(19) United States
(12) Patent Application Publication
(10) Pub. No.: US 2004/0175743 A1
(43) Pub. Date: Sep. 9, 2004

(54) Methods for monitoring drug activities in vivo

(76) Inventors: Michael E. Burczynski, Swampscott, MA (US); Natalie C. Twine, Goffstown, NH (US); Andrew J. Dorner, Lexington, MA (US); William L. Trepicchio, Andover, MA (US)

Correspondence Address: NIXON PEABODY, LLP, 401 9TH STREET, NW, SUITE 900, WASHINGTON, DC, 20004-2128, US

(21) Appl. No.: 10/775,169

(22) Filed: Feb. 11, 2004

Related U.S. Application Data
(60) Provisional application No. 60/446,133, filed on Feb. 11, 2003.
(60) Provisional application No. 60/459,782, filed on Apr. 3, 2003.

(51) Int. Cl. C12Q 1/68; G01N 33/567

(52) U.S. Cl. 435/6; 435/7.21

(57) ABSTRACT

Methods, systems and equipment useful for monitoring in vivo activities of CCI-779 or other drugs. Numerous drug activity genes can be identified by the present invention. The expression profiles of these genes in peripheral blood mononuclear cells can be modulated by CCI-779 or other drugs. Therefore, these genes can be used as surrogate markers for monitoring drug activities in vivo.

[0001] This application claims the benefit and incorporates by reference the entire disclosures of U.S. Provisional Application Serial No. 60/446,133, filed Feb. 11, 2003 and entitled “Methods for Monitoring Drug Activities in Vivo,” U.S. Provisional Application Serial No. 60/459,782, filed Apr. 3, 2003 and entitled “Methods for Diagnosing RCC and/or Solid Tumors,” and U.S. Provisional Application, filed Jan. 23, 2004 and entitled “Methods for Prognosis and Treatment of Solid Tumors” (by Michael Burczynski, et al.). In addition, this application incorporates by reference all materials recorded in compact discs labeled “Copy 1” and “Copy 2.” Each of the compact discs includes “Sequence Listing.ST25.txt” (3,647 KB, created Feb. 9, 2004) and “Table 1 (the Qualifier Table).txt” (210 KB, created Feb. 8, 2004).

### TECHNICAL FIELD

[0002] This invention relates to methods, systems and equipment useful for monitoring in vivo activities of CCI-779 or other drugs.

### BACKGROUND

[0003] CCI-779 is an ester analog of the immunosuppressant rapamycin and as such is a potent, selective inhibitor of the mammalian target of rapamycin. The mammalian target of rapamycin (mTOR) activates multiple signaling pathways, including phosphorylation of p70s6kinase, which results in increased translation of 5′ TOP mRNAs encoding proteins involved in translation and entry into the G1 phase of the cell cycle. By virtue of its inhibitory effects on mTOR and cell cycle control, CCI-779 may function as a cytostatic and immunosuppressive agent. CCI-779 has been used as an anticancer drug and is currently being evaluated for indications in clinical trials for treating various oncology and inflammatory diseases. These diseases include, but are not limited to, renal cell carcinoma (RCC), prostate cancer, gliomas, lung cancer, and non-Hodgkin's lymphoma.

### SUMMARY OF THE INVENTION

[0004] One of the main objectives of clinical pharmacogenomic studies is to identify suitable markers for monitoring in vivo activities of CCI-779 or other drugs. The present invention employs easily-obtained tissues, such as peripheral blood, as surrogate tissues for the detection of in vivo activities of CCI-779 or other drugs.

[0005] In one aspect, the present invention provides methods that are useful for detecting in vivo activities of CCI-779 or other drugs. The methods include comparing an expression profile of at least one drug activity gene in a peripheral blood sample of a patient of interest to a reference expression profile of the gene, where the gene is differentially expressed in peripheral blood mononuclear cells (PBMCs) of patients who have a non-blood disease and are subject to a drug therapy as compared to PBMCs isolated from the patients prior to the drug therapy. In many embodiments, the patient of interest has the non-blood disease and is being treated by the drug therapy.

[0006] In one embodiment, the drug therapy is an anti-cancer therapy, such as CCI-779 therapy, and the non-blood disease is a solid tumor, such as RCC, prostate cancer, or head/neck cancer. In another embodiment, the drug activity genes of the present invention are selected from Table 5.

[0007] The peripheral blood samples used in the present invention can be, without limitation, whole blood samples or samples comprising enriched PBMCs. Other peripheral blood samples that include PBMCs can also be employed in the present invention.

[0008] The expression profiles of the drug activity genes can be determined by various means, such as quantitative RT-PCR, Northern Blot, in situ hybridization, slot-blotting, nuclease protection assay, nucleic acid arrays, enzyme-linked immunosorbent assays (ELISAs), radioimmunoassay (RIAs), fluorescence-activated cell sorters (FACSs), or Western Blots. In addition, two-dimensional SDS-polyacrylamide gel electrophoresis and other high-through nucleic acid or protein detection techniques can also be used.

[0009] In many embodiments, the reference expression profile and the expression profile being compared are prepared using the same or comparable methodology. In one example, the reference expression profile is an average baseline expression profile of drug activity genes in peripheral blood samples isolated from patient or patients prior to a drug treatment. In another example, the reference expression profile is an expression profile of drug activity genes in peripheral blood samples of the patient of interest. The reference expression profile and the expression profile being compared can be obtained from peripheral blood samples isolated at different time points in a drug treatment.

[0010] In one embodiment, the drug activity genes used in the present invention are over-expressed (or under-expressed) in PBMCs of patient who have a non-blood disease as compared to PBMCs of humans who do not have the non-blood disease. The drug therapy being investigated can down-regulate (or up-regulate) the expression of the drug activity genes in PBMCs of patients who have the non-blood disease.

[0011] In another embodiment, the expression of the drug activity genes in PBMCs can be stimulated (or suppressed) by phytohemagglutinin (PHA). The drug therapy being investigated can down-regulate (or up-regulate) the expression of these genes in PHA-treated PBMCs.

[0012] In another aspect, the present invention provides other methods that are useful for detecting in vivo activities of CCI-779 or other drugs. The methods include comprises comparing an expression profile of at least one drug activity gene in a peripheral blood sample of a patient of interest to a reference expression profile of the gene, where the RNA transcript(s) of the drug activity gene can hybridize under stringent or nucleic acid array hybridization conditions to one or more qualifiers selected from the Qualifier Table.

[0013] In yet another aspect, the present invention provides methods useful for identifying drug activity genes. The methods include detecting the gene expression profile in peripheral blood samples of patients who have a non-blood disease and are subject to a drug therapy, and comparing the gene expression profile to a baseline gene expression profile in peripheral blood samples isolated before the drug therapy. Drug activity genes whose expression levels in peripheral blood samples can be modulated by the drug therapy can therefore be identified.

[0014] In still another aspect, the present invention provides kits useful for detecting in vivo activities of CCI-779 or other drugs. In one embodiment, the kits include a plurality of polynucleotides, and each polynucleotide can hybridize under stringent or nucleic acid array hybridization conditions to an RNA transcript, or the complement thereof, of a different respective drug activity gene. In another embodiment, the kits include a plurality of antibodies, and each antibody can bind to a polypeptide encoded by a different respective drug activity gene. The drug activity genes can be selected, without limitation, from Table 5.

[0015] In still yet another aspect, the present invention provides nucleic acid arrays useful for detecting in vivo activities of CCI-779 or other drugs. A substantial portion of all polypeptide probes on the nucleic acid array can hybridize under stringent or nucleic acid array hybridization conditions to RNA transcripts, or the complements thereof, of drug activity genes.

[0016] Other features, objects, and advantages of the present invention are apparent in the detailed description that follows. It should be understood, however, that the detailed description, while indicating preferred embodiments of the invention, are given by way of illustration only, not limitation. Various changes and modifications within the scope of the invention will become apparent to those skilled in the art from the detailed description.

### DETAILED DESCRIPTION

[0017] The present invention provides methods useful for the detection of in vivo activities of CCI-779 or other drugs. Numerous drug activity genes can be identified by the present invention. The expression profiles of these genes in PBMCs can be modulated by CCI-779 or other drugs. Accordingly, these genes can be used as surrogate markers for monitoring drug activities in vivo. In one embodiment, the methods of the present invention include comparing the expression profile of at least one drug activity gene in a peripheral blood sample of a patient of interest to a reference expression profile of the same drug activity gene. The patient of interest has a non-blood disease, such as RCC, prostate cancer, or another solid tumor, and is being treated by a drug therapy. A change in the peripheral blood expression profile of the drug activity gene is indicative of the in vivo activity of the drug therapy. In many cases, the reference expression profile can be determined by using baseline peripheral blood samples isolated from patients prior to the drug therapy. Peripheral blood samples amenable to the present invention include, but are not limited to, whole blood samples or samples comprising enriched PBMCs. Expression profiles of drug activity genes can be detected using a variety of methods, such as quantitative RT-PCT, Northern Blot, in situ hybridization, nucleic acid arrays, enzyme-linked immunosorbent assay (ELISA), radioimmunoassay (RIA), FACS (fluorescence-activated cell sorter), or Western Blot. The drug activity genes of the present invention may also be used for assessing the efficiency of a drug therapy.

[0018] Various aspects of the invention are described in further detail in the following sections. The use of sections is not meant to limit the invention. Each section and subsection may apply to any aspect of the invention. In this application, the use of “or” means “and/or” unless stated otherwise. Also, the use of the singular includes the plural unless stated otherwise.

[0019] A. General Methods for Identifying Drug Activity Genes

[0020] The availability of the human genome sequence, together with new developments in technology, such as DNA microarrays, proteomics and computational biology, allows systemic gene expression studies for various diseases. The present invention employs the systematic gene expression analysis technique to identify genes whose expression in peripheral blood can be modulated by a therapeutic agent such as CCI-779. These genes are herein referred to as “drug activity genes.” The genes whose expression levels in peripheral blood can be modified by CCI-779 are refereed to as “CCI-779 activity genes.”

[0021] Drug activity genes can be identified by comparing peripheral blood gene expression profiles before and after a drug treatment. Numerous methods are available for detecting and comparing gene expression profiles.

[0022] For instance, gene expression profiles can be detected by measuring the levels of RNA transcripts in peripheral blood samples. In one embodiment, total RNAs or polyA⁺ RNAs are isolated from peripheral blood samples using conventional means. The isolated RNAs can be amplified to produce cDNAs or cRNAs. Peripheral blood gene expression profiles can be determined by measuring the amount of the amplified cDNAs or cRNAs.

[0023] Peripheral blood gene expression profiles can also be determined by measuring the levels of polypeptides in peripheral blood samples. The amounts of polypeptides in peripheral samples can be detected using various methods, such as ELISAs, RIAs, FACSs, Western Blots or other immunoassays. In addition, two-dimensional gel electrophoresis/mass spectrometry or other high-throughput protein sequencing and identification methods can be used.

[0024] In one embodiment, nucleic acid arrays are used for detecting or comparing gene expression profiles in peripheral blood samples isolated at different stages of a therapeutic treatment. Nucleic acid arrays allow for quantitative detection of the expression levels of a large number of genes at one time. Examples of nucleic acid arrays include, but are not limited to, Genechip® microarrays from Affymetrix (Santa Clara, Calif.), cDNA microarrays from Agilent Technologies (Palo Alto, Calif.), and bead arrays described in U.S. Pat. Nos. 6,288,220 and 6,391,562.

[0025] The polynucleotides to be hybridized to nucleic acid arrays can be labeled with one or more labeling moieties to allow for detection of hybridized polynucleotide complexes. The labeling moieties can include compositions that are detectable by spectroscopic, photochemical, biochemical, bioelectronic, immunochemical, electrical, optical or chemical means. Exemplary labeling moieties include radioisotopes, chemiluminescent compounds, labeled binding proteins, heavy metal atoms, spectroscopic markers such as fluorescent markers and dyes, magnetic labels, linked enzymes, mass spectrometry tags, spin labels, electron transfer donors and acceptors, and the like. Unlabeled polynucleotides can also be employed. The polynucleotides can be DNA, RNA, or a modified form thereof.

[0026] Hybridization reactions can be performed in absolute or differential hybridization formats. In the absolute hybridization format, polynucleotides derived from one sample, such as a peripheral blood sample isolated from a cancer patient at a particular treatment stage, are hybridized to the probes in a nucleic acid array. Signals detected after the formation of hybridization complexes correlate to the polynucleotide levels in the sample. In the differential hybridization format, polynucleotides derived from two biological samples, such as one isolated from a cancer patient at a first stage of treatment and the other isolated from the same patient but at a second stage of treatment, are labeled with different labeling moieties. A mixture of these differently labeled polynucleotides is added to a nucleic acid array. The nucleic acid array is then examined under conditions in which the emissions from the two different labels are individually detectable. In one embodiment, the fluorophores Cy3 and Cy5 (Amersham Pharmacia Biotech, Piscataway N.J.) are used as the labeling moieties for the differential hybridization format.

[0027] Signals gathered from nucleic acid arrays can be analyzed using commercially available software, such as those provide by Affymetrix or Agilent Technologies. Controls, such as for scan sensitivity, probe labeling and cDNA/cRNA quantitation, can be included in the hybridization experiments. In many embodiments, the nucleic acid array expression signals are scaled or normalized before being subject to further analysis. For instance, the expression signals for each gene can be normalized to take into account variations in hybridization intensities when more than one array is used under similar test conditions. Signals for individual polynucleotide complex hybridization can also be normalized using the intensities derived from internal normalization controls contained on each array. In addition, genes with relatively consistent expression levels across the samples can be used to normalize the expression levels of other genes. In one embodiment, the expression levels of the genes are normalized across the samples such that the mean is zero and the standard deviation is one. In another embodiment, the expression data detected by nucleic acid arrays are subject to a variation filter which excludes genes showing minimal or insignificant variation across all samples.

[0028] A variety of peripheral blood samples can be used in the present invention. In one embodiment, the peripheral blood samples are whole blood samples. In another embodiment, the peripheral blood samples comprise enriched PBMCs. By “enriched,” it means that the percentage of PBMCs in the sample is higher than that in whole blood. In many cases, the PBMC percentage in an enriched sample is at least 1, 2, 3, 4, 5 or more times higher than that in whole blood. In many other cases, the PBMC percentage in an enriched sample is at least 90%, 95%, 98%, 99%, 99.5%, or more. Blood samples containing enriched PBMCs can be prepared using any method known in the art, such as Ficoll gradients centrifugation or CPTs (cell purification tubes).

[0029] Peripheral blood samples used in the present can be isolated at any stage of a drug treatment (including baseline samples isolated before the drug treatment). For instance, the samples can be isolated from patients at 1 day, 2 days, 3 days, 4 days, 5 days, 6 days, 1 week, 2 weeks, 3 weeks, 4 weeks, 8 weeks, or 16 weeks after initiation of a drug treatment. Other time points can also be used for isolating blood samples for monitoring or assessing in vivo drug activities.

[0030] In many embodiments, the patients being treated by a drug therapy of interest have a non-blood disease, such as a solid tumor. Solid tumors amenable to the present invention include, but are not limited, RCC, prostate cancer, head/neck cancer, ovarian cancer, testicular cancer, brain tumor, breast cancer, lung cancer, colon cancer, pancreas cancer, stomach cancer, bladder cancer, skin cancer, cervical cancer, uterine cancer, and liver cancer. In one embodiment, the solid tumors have the following characteristics: (1) a mass of hyperproliferating cells of clonal origin, and (2) acquisition of an aggressively invasive phenotype, where cancer cells leave the tissue of origin and establish new tumor metastases at distant sites. In one example, the patients have RCC.

[0031] Any cancer or disease treatment can be evaluated by the present invention. Exemplary cancer treatments include the use of cytokines, such as interferon or interleukin 2. In addition, chemotherapy drugs can be used, either individually or in combination with other drugs, cytokines or therapies. Suitable chemotherapy drugs include, but are not limited to, CCI-779, AN-238, vinblastine, floxuridine, 5-fluorouracil, and tamoxifen. AN238 is a cytotoxic agent which has 2-pyrrolinodoxorubicin linked to a somatostatin (SST) carrier octapeptide. AN238 can be targeted to SST receptors on the surface of RCC tumor cells. Moreover, monoclonal antibodies, antiangiogenesis drugs, and anti-growth factor drugs can be employed to treat cancers.

[0032] The gene expression profile in peripheral blood samples isolated at one stage of a drug treatment can be compared to that at another stage of the drug treatment. Drug activity genes that are differentially expressed in PBMCs at one stage of the treatment relative to another stage of treatment can therefore be identified. In one embodiment, the PBMC expression level of a drug activity gene is substantially higher at one stage than at another stage. For instance, an average PBMC expression level of a drug activity gene at one stage can be at least 1.5, 2, 3, 4, 5, 10, 20, or more times of that at another stage. In another embodiment, the PBMC expression level of a drug activity gene is substantially lower at one stage than at another stage. For instance, an average PBMC expression level of a drug activity gene at one stage can be no greater than 0.67, 0.5, 0.33, 0.25, 0.1, 0.05, or less times of that at another stage.

[0033] In yet another embodiment, drug activity genes can be identified using clustering algorithms based on the nucleic acid array gene expression data. For instance, unsupervised cluster analyses can be used to analyze and categorize genes which have differential expression patterns between different drug treatment stages. Algorithms for unsupervised cluster analysis include, but are not limited to, self-organized maps (SOMs), principle component analysis, average linkage clustering, and hierarchical clustering.

[0034] Supervised cluster analysis can also be used to organize and identify drug activity genes. Algorithms for supervised cluster analysis include, but are not limited to, nearest neighbors test, support vector machines, and SPLASH. Either two-class or multi-class correlation metrics can be used.

[0035] B. Identification of CCI-779 Activity Genes

[0036] In one embodiment, HG-U95Av2 gene chips (manufactured by Affymetrix) were used for detecting and comparing the levels of RNA transcripts in PBMC-enriched peripheral blood samples. Peripheral blood samples were isolated from RCC patients at different stages of CCI-779 treatment (See Example 1). The CCI-779 treatment included intravenous administration of 25, 75 or 250 mg of CCI-779 once weekly. Peripheral blood samples were isolated from RCC patients immediately before the initial administration of CCI-779, and then 8 weeks and 16 weeks thereafter.

[0037] cRNA were prepared from the isolated PBMC samples and hybridized to HG-U95Av2 genechips. Hybridization signals were collected for each oligonucleotide probe on the genechips. Signals from the oligonucleotide probes of the same qualifier were averaged. Qualifiers that produce different hybridization signals in samples isolated at different treatment time points were identified. Examples of these identified qualifiers are illustrated in Table 1 (“the Qualifier Table”).

[0038] In general, each qualifier in the Qualifier Table corresponds to at least one CCI-779 activity gene, and the RNA transcripts of the gene can hybridize under stringent or nucleic acid array hybridization conditions to the qualifier. As used herein, “hybridize to a qualifier” means to hybridize to at least one oligonucleotide probe of the qualifier. In many embodiments, the RNA transcripts of a CCI-779 activity gene can hybridize under stringent or nucleic acid array hybridization conditions to at least 2, 4, 6, 8, 10, 12, 14 or 16 oligonucleotide probes of the corresponding qualifier.

[0039] Table 2 lists the expression profiles of some qualifiers that produced different hybridization signals for PBMC samples isolated at different treatment stages. Each expression profile in Table 2 (“Baseline,” “8 wks Average,” or “16 wks Average”) was an average of PBMC samples of 110 RCC patients. Each expression profile under “Baseline,” “8 wks Average,” and “16 wks Average” represented the hybridization signals on the respective qualifier for PBMC samples isolated immediately before the initial CCI-779 administration, 8 weeks after the initial administration, and 16 weeks after the initial administration, respectively. The p-value of an ANOVA analysis was provided for each qualifier. The p-value suggests the statistical significance of the difference observed between the expression profiles obtained at different CCI-779 treatment stages. Lesser p-values indicate more statistical significance for the differences observed between different treatment stages.

TABLE 2
PBMC Gene Expression Profiles at
Different CCI-779 Treatment Stages

| | | 8 wks | 16 wks | | |
|---|---|---|---|---|---|
| | Baseline | Average | Average | ANOVA | |
| Qualifier | (n = 110) | (n = 110) | (n = 110) | P-Value | CPS |
| 34768_at | 7.90 | 19.4 | 20.8 | 2.5E−11 | 1 |
| 36097_at | 113 | 195 | 247 | 8.0E−11 | 2 |
| 36675_r_at | 62.2 | 109 | 144 | 8.4E−11 | 3 |
| 37940_f_at | 6.95 | 22.7 | 28.8 | 5.1E−10 | 4 |
| 34338_at | 16.0 | 29.3 | 35.4 | 5.9E−10 | 5 |
| 38991_at | 27.2 | 15.2 | 12.9 | 1.3E−09 | 6 |
| 38976_at | 42.6 | 103.7 | 139 | 4.6E−09 | 7 |
| 37905_r_at | 32 | 19.0 | 13.9 | 6.0E−09 | 8 |
| 38780_at | 11.9 | 23.1 | 32.0 | 7.1E−09 | 9 |
| 41215_s_at | 48.4 | 91 | 113 | 7.1E−09 | 10 |
| 35956_s_at | 11.1 | 3.81 | 4.19 | 9.3E−09 | 11 |
| 32332_at | 8.14 | 18.6 | 21.9 | 1.1E−08 | 13 |
| 41551_at | 8.48 | 14.0 | 19.3 | 1.8E−08 | 14 |
| 39332_at | 21.9 | 10 | 9.14 | 1.9E−08 | 15 |
| 40778_at | 6.19 | 11.7 | 15.6 | 1.9E−08 | 16 |
| 32232_at | 9.81 | 16.2 | 19.7 | 4.5E−08 | 17 |
| 34310_at | 11.3 | 19.1 | 26.3 | 5.8E−08 | 18 |
| 1184_at | 24.4 | 56.6 | 76.0 | 8.3E−08 | 19 |
| 35688_g_at | 10.1 | 20.2 | 15.7 | 8.4E−08 | 20 |
| 38981_at | 6.48 | 14.4 | 16.2 | 8.9E−08 | 21 |
| 37391_at | 173 | 89.3 | 28.4 | 1.3E−07 | 23 |
| 39593_at | 9.10 | 38.5 | 62.6 | 1.4E−07 | 24 |
| 32505_at | 8.62 | 4.62 | 4.24 | 1.6E−07 | 25 |
| AFFX- | 36.3 | 10.1 | 11.9 | 1.8E−07 | 26 |
| M27830_5_at | | | | | |
| 35666_at | 19.8 | 11.4 | 9.76 | 2.0E−07 | 27 |
| 39061_at | 18.6 | 37.0 | 47.0 | 2.1E−07 | 28 |
| 39748_at | 29.9 | 14.8 | 12.2 | 2.5E−07 | 29 |
| 40505_at | 12.8 | 26.1 | 37.0 | 2.7E−07 | 30 |
| 38597_f_at | 15.6 | 7.48 | 6.95 | 3.3E−07 | 31 |
| 39545_at | 13.0 | 34.2 | 43.8 | 3.3E−07 | 32 |
| 34268_at | 14.3 | 33.3 | 48.9 | 4.2E−07 | 33 |
| 38816_at | 13.3 | 7.05 | 5.62 | 4.8E−07 | 34 |
| 38732_at | 8.95 | 16.2 | 18.6 | 5.0E−07 | 35 |
| 40607_at | 9 | 23.8 | 36.4 | 5.1E−07 | 36 |
| 37200_at | 29.3 | 70.6 | 111 | 6.5E−07 | 37 |
| 283_at | 13.8 | 26.8 | 34.8 | 6.6E−07 | 38 |
| 40757_at | 10.8 | 33.0 | 56.1 | 7.1E−07 | 39 |
| 384_at | 19.2 | 36.0 | 51.7 | 9.0E−07 | 41 |
| 40814_at | 19 | 12.2 | 9.24 | 9.4E−07 | 42 |
| 37027_at | 31.8 | 60.0 | 85.0 | 9.4E−07 | 43 |
| 1760_s_at | 12.1 | 7.52 | 5.57 | 1.1E−06 | 44 |
| 1292_at | 16.3 | 37.4 | 39.8 | 1.1E−06 | 45 |
| 38287_at | 26.5 | 54.9 | 79.8 | 1.2E−06 | 46 |
| 41591_at | 10.9 | 6.90 | 4.76 | 1.3E−06 | 47 |
| 32475_at | 4.62 | 9.05 | 12.7 | 1.3E−06 | 48 |
| 40782_at | 36.4 | 23.9 | 8.29 | 1.4E−06 | 49 |
| 503_at | 19.7 | 33.3 | 43.2 | 1.5E−06 | 50 |
| 875_g_at | 132 | 68.7 | 10.5 | 1.5E−06 | 51 |
| 37185_at | 288 | 160 | 34.0 | 1.6E−06 | 52 |
| 32282_at | 10.9 | 4.57 | 4.95 | 1.7E−06 | 53 |
| 40981_at | 9.10 | 4.05 | 4.10 | 1.9E−06 | 54 |
| 34782_at | 74.0 | 46.2 | 24.6 | 1.9E−06 | 55 |
| 37373_at | 11.9 | 19.4 | 24.0 | 2.0E−06 | 56 |
| 40018_at | 8 | 4.67 | 3.57 | 2.1E−06 | 57 |
| 31638_at | 7.19 | 12.9 | 16.0 | 2.1E−06 | 58 |
| 38191_at | 14.4 | 3.14 | 3.38 | 2.4E−06 | 59 |
| 33396_at | 44.2 | 73.2 | 91.0 | 2.6E−06 | 60 |
| 38104_at | 4.33 | 6.76 | 8.76 | 2.6E−06 | 61 |
| 32193_at | 7.90 | 16.3 | 24.1 | 2.8E−06 | 62 |
| 38350_f_at | 4.90 | 8.95 | 10.4 | 2.8E−06 | 63 |
| 1985_s_at | 5.57 | 9.19 | 11.9 | 2.9E−06 | 64 |
| 38598_at | 10.5 | 3.71 | 3.05 | 3.3E−06 | 65 |
| 41446_f_at | 17.6 | 38.9 | 44.8 | 3.3E−06 | 66 |
| 41436_at | 15.8 | 9.71 | 7.05 | 3.3E−06 | 67 |
| 36672_at | 7 | 17.2 | 26 | 3.4E−06 | 68 |
| 38717_at | 6.62 | 15.1 | 21.0 | 3.7E−06 | 70 |
| 32183_at | 36.3 | 22.6 | 14.9 | 3.8E−06 | 71 |
| 32737_at | 14.2 | 26.4 | 36.9 | 4.3E−06 | 72 |
| 40140_at | 24.5 | 16.9 | 11.9 | 4.6E−06 | 73 |
| 40818_at | 23.9 | 14.1 | 10 | 4.7E−06 | 74 |
| 34787_at | 15.7 | 24.8 | 37.2 | 4.9E−06 | 75 |
| 38652_at | 7.05 | 13.5 | 15.5 | 5.0E−06 | 76 |
| 41812_s_at | 5.76 | 10.5 | 12.7 | 5.1E−06 | 77 |
| 31622_f_at | 18.5 | 34.9 | 38.3 | 6.3E−06 | 78 |
| 40828_at | 30.7 | 24.3 | 14.9 | 6.7E−06 | 79 |
| 39693_at | 3.76 | 9.10 | 11.0 | 7.7E−06 | 80 |
| 40994_at | 12.2 | 8.67 | 5.29 | 7.8E−06 | 81 |
| 39802_at | 24 | 13.6 | 5.19 | 9.1E−06 | 83 |
| 40567_at | 39.1 | 65.4 | 96.8 | 1.0E−05 | 84 |
| 38518_at | 16.7 | 11.9 | 6.67 | 1.1E−05 | 85 |
| 1368_at | 17.9 | 11.3 | 4 | 1.1E−05 | 87 |
| 41653_at | 8.29 | 4.57 | 3.29 | 1.3E−05 | 88 |
| 41669_at | 13.2 | 8.43 | 5.10 | 1.3E−05 | 89 |
| 36488_at | 7.81 | 17.7 | 25.5 | 1.4E−05 | 90 |
| 1005_at | 61.6 | 129 | 166 | 1.5E−05 | 91 |
| 36495_at | 71.2 | 37.3 | 26.4 | 1.7E−05 | 92 |
| 40579_at | 7.67 | 4.24 | 3.43 | 1.7E−05 | 93 |
| 36607_at | 6.05 | 11.9 | 16.2 | 2.0E−05 | 94 |
| 34311_at | 15.8 | 24.8 | 34.9 | 2.1E−05 | 95 |
| 35785_at | 92.4 | 71.7 | 45.3 | 2.1E−05 | 96 |
| 40622_r_at | 45 | 24.4 | 20.9 | 2.2E−05 | 97 |
| 33777_at | 7.43 | 20.9 | 31.7 | 2.2E−05 | 98 |
| 38220_at | 5.71 | 11.4 | 16.8 | 2.5E−05 | 99 |
| 1665_s_at | 6.86 | 26.5 | 39.9 | 2.6E−05 | 100 |
| 1693_s_at | 321 | 244 | 91.2 | 2.9E−05 | 101 |
| 32612_at | 5.90 | 8.86 | 12.1 | 2.9E−05 | 102 |
| 41045_at | 16.7 | 33.4 | 48.8 | 3.0E−05 | 103 |
| 37233_at | 19.9 | 9.52 | 2.86 | 3.0E−05 | 104 |
| 37967_at | 61.3 | 132 | 159 | 3.1E−05 | 105 |
| 2049_s_at | 11.9 | 26.9 | 32.8 | 3.3E−05 | 106 |
| 39997_at | 24.3 | 38.5 | 49.0 | 3.4E−05 | 107 |
| 41332_at | 8.14 | 13.7 | 18.1 | 3.4E−05 | 108 |
| 115_at | 51.5 | 35.0 | 9.19 | 3.6E−05 | 109 |
| 40964_at | 7.62 | 3.29 | 3.10 | 3.7E−05 | 110 |
| 35303_at | 25.8 | 19.6 | 12.0 | 4.0E−05 | 111 |
| 40742_at | 10 | 28.8 | 37.4 | 4.1E−05 | 112 |
| 37955_at | 4.14 | 5.81 | 8.38 | 4.4E−05 | 113 |
| 39698_at | 4.10 | 6.52 | 9.29 | 4.5E−05 | 114 |
| 32586_at | 6.05 | 9.67 | 12.4 | 4.5E−05 | 115 |
| 40159_r_at | 10.5 | 20.9 | 46.6 | 5.0E−05 | 116 |
| 32635_at | 8.24 | 3.95 | 3.57 | 5.0E−05 | 117 |
| 35840_at | 5.05 | 7.86 | 11.8 | 5.1E−05 | 118 |
| 37661_at | 21.2 | 13.3 | 6.48 | 5.1E−05 | 119 |
| 411_i_at | 29.2 | 40.1 | 65.6 | 5.1E−05 | 120 |
| 35012_at | 20.4 | 40.3 | 74.9 | 5.2E−05 | 121 |
| 38760_f_at | 9.33 | 16.0 | 21.4 | 5.3E−05 | 122 |
| 36474_at | 9.48 | 5.81 | 4.48 | 5.3E−05 | 123 |
| 41440_at | 4.24 | 9.38 | 9.10 | 5.4E−05 | 124 |
| 39953_i_at | 23.1 | 9.14 | 7.71 | 5.8E−05 | 125 |
| 245_at | 45.8 | 62.2 | 103 | 6.0E−05 | 126 |
| 37181_at | 3.67 | 5.90 | 7.52 | 6.0E−05 | 127 |
| 39799_at | 31.3 | 21.3 | 7.90 | 6.2E−05 | 128 |
| 39320_at | 6.48 | 12.4 | 16.1 | 6.4E−05 | 129 |
| 794_at | 5.29 | 10.2 | 14.0 | 6.4E−05 | 130 |
| 36091_at | 7.33 | 11.7 | 18.7 | 6.6E−05 | 131 |
| 37187_at | 66.8 | 45.1 | 11.7 | 7.2E−05 | 133 |
| 38338_at | 8.76 | 14.2 | 18.3 | 7.2E−05 | 134 |
| 34760_at | 14.3 | 23.0 | 31.0 | 7.3E−05 | 135 |
| 33133_at | 7.67 | 12.3 | 16.3 | 7.6E−05 | 136 |
| 32904_at | 10.2 | 19.4 | 26.2 | 7.7E−05 | 137 |
| 37359_at | 7.71 | 12.4 | 16.3 | 8.2E−05 | 138 |
| 40485_at | 3.95 | 7.81 | 9.81 | 8.3E−05 | 139 |
| 37215_at | 6.86 | 11.3 | 19.4 | 8.4E−05 | 140 |
| 40274_at | 9.10 | 21 | 16.1 | 8.5E−05 | 141 |
| 41174_at | 12.9 | 9.95 | 5.71 | 8.8E−05 | 143 |
| 1715_at | 5.86 | 14.0 | 21.5 | 8.8E−05 | 144 |
| 41503_at | 10.1 | 7.71 | 4.90 | 8.9E−05 | 145 |
| 40390_at | 5.71 | 3.62 | 2.81 | 9.2E−05 | 146 |
| 40811_at | 13.8 | 10.5 | 6.81 | 9.3E−05 | 147 |
| 31499_s_at | 11.7 | 24.6 | 41.3 | 9.3E−05 | 148 |
| 34023_at | 4.76 | 7.33 | 11.9 | 9.5E−05 | 149 |
| 1125_s_at | 8.57 | 6.29 | 4.24 | 9.7E−05 | 150 |
| 36617_at | 15.4 | 34.2 | 43.7 | 9.9E−05 | 151 |
| 36337_at | 15.2 | 7.48 | 5.95 | 0.00010 | 152 |
| 36161_at | 5.24 | 7.95 | 10.8 | 0.00010 | 153 |
| 1433_g_at | 22.0 | 15 | 8.62 | 0.00010 | 154 |
| 39043_at | 64.8 | 96.1 | 134 | 0.00011 | 155 |
| 37311_at | 67.7 | 94.7 | 139 | 0.00012 | 156 |
| 37009_at | 16.3 | 25.9 | 41.7 | 0.00013 | 157 |
| 33942_s_at | 17.9 | 9.52 | 7.86 | 0.00013 | 158 |
| 39641_at | 3.67 | 9.86 | 10.9 | 0.00013 | 159 |
| 529_at | 10.8 | 23.1 | 22.5 | 0.00013 | 160 |
| 32199_at | 8.81 | 2.90 | 2.95 | 0.00014 | 161 |
| 1426_at | 59.8 | 45.1 | 27.5 | 0.00014 | 162 |
| 31851_at | 17 | 12.5 | 8.10 | 0.00014 | 163 |
| 34378_at | 124 | 49.4 | 26.3 | 0.00014 | 164 |
| 36173_r_at | 6.90 | 2.52 | 3.81 | 0.00016 | 165 |
| 35275_at | 5 | 2.29 | 2.81 | 0.00017 | 166 |
| 41184_s_at | 7.33 | 14.8 | 18.0 | 0.00018 | 168 |
| 38391_at | 16.5 | 23.0 | 33.3 | 0.00018 | 170 |
| 39829_at | 28.0 | 17.8 | 13.6 | 0.00019 | 171 |
| 37587_at | 6.71 | 3.19 | 2.90 | 0.00020 | 172 |
| 34022_at | 35.0 | 20.0 | 3.52 | 0.00020 | 173 |
| 34188_at | 13.7 | 9.62 | 6.05 | 0.00022 | 175 |
| 37647_at | 13.2 | 25.3 | 35.2 | 0.00022 | 176 |
| 40089_at | 20.4 | 12.0 | 9.24 | 0.00023 | 177 |
| 39982_r_at | 7.52 | 4.76 | 2.95 | 0.00024 | 178 |
| 32202_at | 3.14 | 5.57 | 8.48 | 0.00026 | 179 |
| 35036_at | 7.33 | 2.71 | 2.81 | 0.00027 | 180 |
| 906_at | 34.6 | 23.6 | 12.6 | 0.00027 | 181 |
| 36033_at | 12.8 | 8.38 | 6.10 | 0.00028 | 182 |
| 36766_at | 20.8 | 36.2 | 57.2 | 0.00029 | 183 |
| 38893_at | 38.2 | 48.4 | 78.4 | 0.00029 | 184 |
| 37374_at | 3.86 | 6.38 | 8 | 0.00030 | 185 |
| 36599_at | 4.57 | 6.76 | 9.38 | 0.00030 | 186 |
| 464_s_at | 7.43 | 12.7 | 16.5 | 0.00030 | 187 |
| 32533_s_at | 6.05 | 13.1 | 17.0 | 0.00031 | 188 |
| 36496_at | 7.62 | 11 | 15.9 | 0.00031 | 189 |
| 36280_at | 7.62 | 13 | 18.4 | 0.00033 | 190 |
| 38126_at | 16.2 | 8.86 | 7.71 | 0.00033 | 191 |
| 37011_at | 22.4 | 38.9 | 52.2 | 0.00035 | 192 |
| 39166_s_at | 9.24 | 2.10 | 2.38 | 0.00037 | 193 |
| 1825_at | 16.6 | 28.0 | 35.2 | 0.00040 | 195 |
| 41577_at | 13.5 | 13.7 | 4.38 | 0.00041 | 196 |
| 33161_at | 3.14 | 6.10 | 9.81 | 0.00042 | 197 |
| 31438_s_at | 11.5 | 14.7 | 23.4 | 0.00043 | 198 |
| 36372_at | 5.05 | 12.6 | 19.7 | 0.00043 | 199 |
| 2094_s_at | 50.3 | 104 | 141 | 0.00045 | 200 |
| 32977_at | 11.6 | 22.6 | 33.4 | 0.00048 | 201 |
| 32264_at | 9.29 | 18.1 | 20.2 | 0.00048 | 202 |
| 32184_at | 9.90 | 16.4 | 20.0 | 0.00048 | 203 |
| 35674_at | 4.52 | 7.67 | 12 | 0.00049 | 204 |
| 41249_at | 5.43 | 8.90 | 14.3 | 0.00051 | 205 |
| 36762_at | 8.33 | 3.95 | 4.43 | 0.00052 | 206 |
| 37146_at | 13.3 | 5.24 | 4.90 | 0.00055 | 207 |
| 867_s_at | 13.7 | 7.24 | 3.57 | 0.00055 | 208 |
| 33500_i_at | 53.9 | 32.3 | 26.4 | 0.00056 | 209 |
| 1575_at | 7.71 | 5.67 | 3.57 | 0.00056 | 210 |
| 40088_at | 22.4 | 18.7 | 10.2 | 0.00060 | 211 |
| 37742_at | 6.19 | 9.81 | 14.5 | 0.00067 | 213 |
| 35992_at | 13.1 | 9.33 | 5.19 | 0.00072 | 214 |
| 35710_s_at | 6.29 | 10.6 | 13.0 | 0.00073 | 216 |
| 39119_s_at | 12.2 | 18.1 | 31.3 | 0.00074 | 217 |
| 34857_at | 14.9 | 9.43 | 6.29 | 0.00078 | 218 |
| 41198_at | 26 | 46.0 | 67.8 | 0.00080 | 219 |
| 34476_r_at | 11.5 | 8.48 | 3.81 | 0.00084 | 220 |
| 35772_at | 5.62 | 2.71 | 2.95 | 0.00086 | 221 |
| 34660_at | 13.1 | 20.3 | 28.4 | 0.00090 | 222 |
| 35648_at | 14.4 | 11.1 | 5.71 | 0.00097 | 223 |
| AFFX- | 65.8 | 30.3 | 34.9 | 0.00099 | 225 |
| HUMRGE/ | | | | | |
| M10098_3_at | | | | | |
| 31324_at | 7.43 | 3.71 | 3.48 | 0.00099 | 226 |
| 1395_at | 7.19 | 12.7 | 14.7 | 0.0010 | 227 |
| 32066_g_at | 27.2 | 22.4 | 12.2 | 0.0010 | 228 |
| 1107_s_at | 20.0 | 39.8 | 60 | 0.0010 | 229 |
| 1097_s_at | 29.0 | 21.7 | 9.86 | 0.0011 | 230 |
| 35591_at | 4.48 | 10 | 7.86 | 0.0011 | 231 |
| 32815_at | 17.2 | 7.86 | 6.33 | 0.0011 | 232 |
| 36231_at | 20.6 | 15.7 | 9.29 | 0.0011 | 233 |
| 38823_s_at | 10.8 | 9.76 | 5.10 | 0.0012 | 234 |
| 32618_at | 6.05 | 9.43 | 12.3 | 0.0013 | 235 |
| 2092_s_at | 9.57 | 6.62 | 2.67 | 0.0014 | 236 |
| 37184_at | 8.62 | 2.67 | 2.81 | 0.0014 | 237 |
| 37120_at | 15.8 | 8.71 | 3.48 | 0.0014 | 238 |
| 1237_at | 79.6 | 66.5 | 32.8 | 0.0015 | 239 |
| 37310_at | 9.76 | 9.38 | 3.95 | 0.0016 | 241 |
| 40541_at | 13.0 | 6.10 | 8.90 | 0.0016 | 242 |
| 31346_at | 4.90 | 10.5 | 7.10 | 0.0017 | 244 |
| 37875_at | 11.4 | 5.52 | 5.67 | 0.0017 | 245 |
| 38125_at | 8.24 | 3.29 | 3.19 | 0.0018 | 246 |
| 859_at | 22.0 | 19.3 | 6.86 | 0.0019 | 247 |
| 35792_at | 8.05 | 5.57 | 3.57 | 0.0020 | 249 |
| 34946_at | 5.48 | 8.14 | 11.2 | 0.0020 | 250 |
| 33956_at | 11.6 | 16.5 | 24.7 | 0.0023 | 253 |
| 32975_g_at | 8.86 | 4.90 | 4.29 | 0.0024 | 254 |
| 38582_at | 6.95 | 2.90 | 3.24 | 0.0025 | 255 |
| 181_g_at | 12 | 19.2 | 29.4 | 0.0025 | 256 |
| 37864_s_at | 10.0 | 6.29 | 3.43 | 0.0028 | 257 |
| 34704_r_at | 8.71 | 4.86 | 4.24 | 0.0028 | 258 |
| 32163_f_at | 10.2 | 6.10 | 4.76 | 0.0029 | 259 |
| 41189_at | 14 | 10 | 6.67 | 0.0030 | 260 |
| 41698_at | 6.81 | 6.24 | 3.33 | 0.0030 | 261 |
| 40456_at | 11.52 | 10.2 | 5.62 | 0.0031 | 262 |
| 41227_at | 15.8 | 7.52 | 10.8 | 0.0033 | 263 |
| 36100_at | 24.4 | 14.8 | 12.0 | 0.0035 | 264 |
| 36411_s_at | 16.2 | 8.19 | 7.90 | 0.0037 | 265 |
| 41167_at | 10.7 | 6.33 | 5.33 | 0.0037 | 266 |
| 41819_at | 4.48 | 6.71 | 9.29 | 0.0037 | 267 |
| 38389_at | 3.76 | 6.95 | 10.2 | 0.0038 | 268 |
| 37975_at | 14.9 | 35.2 | 41.1 | 0.0039 | 269 |
| 39640_at | 14.7 | 6.10 | 7.95 | 0.0043 | 270 |
| 38010_at | 7.38 | 3.90 | 3.33 | 0.0043 | 271 |
| 32675_at | 9.33 | 13.0 | 20.0 | 0.0044 | 272 |
| 1531_at | 8.52 | 4.52 | 3.90 | 0.0044 | 273 |
| 40646_at | 6.81 | 12.5 | 19.4 | 0.0045 | 274 |
| 39474_s_at | 4.71 | 2.33 | 3.05 | 0.0047 | 275 |
| 34498_at | 21 | 28.0 | 48.5 | 0.0053 | 276 |
| 37654_at | 4.05 | 6.95 | 8.14 | 0.0053 | 277 |
| 408_at | 24.4 | 18.2 | 3.48 | 0.0054 | 278 |
| 38340_at | 16.7 | 12.9 | 8.10 | 0.0056 | 279 |
| 1937_at | 31.6 | 13.0 | 9.62 | 0.0059 | 280 |
| 41638_at | 13.3 | 8.38 | 6.10 | 0.0059 | 281 |
| 36138_at | 21 | 32.5 | 42.5 | 0.0060 | 282 |
| 32407_f_at | 13.7 | 6.33 | 5.38 | 0.0061 | 283 |
| 38131_at | 17 | 36.1 | 2.90 | 0.0063 | 284 |
| 39775_at | 11.7 | 22.7 | 32.8 | 0.0064 | 285 |
| 318_at | 5.19 | 6.19 | 10.6 | 0.0073 | 286 |
| 39402_at | 83.1 | 87.2 | 12.4 | 0.0077 | 287 |
| 36543_at | 7.57 | 5.62 | 2.67 | 0.0079 | 288 |
| 1788_s_at | 7.33 | 6.62 | 3.62 | 0.0091 | 289 |
| 34702_f_at | 10.6 | 4.67 | 3.86 | 0.0094 | 290 |
| 40951_at | 5.71 | 2.76 | 2.86 | 0.0098 | 291 |
| 35313_at | 5.43 | 3 | 2.38 | 0.010 | 292 |
| 1520_s_at | 105 | 112 | 16 | 0.011 | 293 |
| 40171_at | 6.05 | 8.14 | 12.8 | 0.011 | 295 |
| 32162_r_at | 14.1 | 7.86 | 6 | 0.012 | 296 |
| 1369_s_at | 365 | 292 | 163 | 0.012 | 297 |
| 34490_f_at | 5.05 | 7.71 | 10.2 | 0.012 | 298 |
| 36710_at | 8.81 | 13.5 | 22.2 | 0.013 | 300 |
| 37220_at | 8.24 | 14.0 | 20.0 | 0.013 | 301 |
| 32003_at | 9.05 | 5.29 | 4.38 | 0.013 | 302 |
| 1667_s_at | 14.4 | 9.57 | 7.14 | 0.013 | 303 |
| 731_f_at | 7.71 | 4.05 | 3.76 | 0.015 | 304 |
| 39448_r_at | 8.38 | 4 | 4.43 | 0.015 | 305 |
| 40385_at | 7 | 11.0 | 2.67 | 0.017 | 306 |
| 37603_at | 83.9 | 88.7 | 36.3 | 0.028 | 307 |
| 41046_s_at | 5.52 | 2.57 | 3.19 | 0.040 | 308 |
| 37456_at | 16 | 30.0 | 37.6 | 0.039 | 309 |
| 31828_r_at | 9.52 | 2.52 | 6 | 0.047 | 310 |

[0040] Each qualifier has a corresponsding CCI-779 activity gene probe sequence (CPS), and each CPS can be derived from a corresponding SEQ ID NO depicted in Table 3. In many cases, each CPS consists of an unambiguous fragment, or the complement thereof, of the corresponding SEQ ID NO. In many other cases, each CPS also comprises at least one oligonucleotide probe of the corresponding qualifier. Each SEQ ID NO in Table 3 is a cDNA or genomic sequence, or the complement thereof, of a CCI-779 activity gene represented by the qualifier that corresponds to the SEQ ID NO. Accordingly, each SEQ ID NO or its corresponding CPS can hybridize under stringent or nucleic acid array hybridization conditions to the RNA transcripts, or the complements thereof, of the represented CCI-779 activity gene.

[0041] Each SEQ ID NO may have an Entrez nucleotide sequence database accession number (see Table 4). The Entrez nucleotide sequence database is maintained by the National Center of Biotechnology Information (NCBI), National Library of Medicine, Washington, D.C. The database collects sequences from several sources, including GenBank, RefSeq, and PDB.

[0042] Any ambiguous residue (“n”) in a SEQ ID NO can be determined by numerous methods. In one embodiment, the ambiguous residues in a SEQ ID NO are determined by aligning the SEQ ID NO to a corresponding genomic sequence obtained from a human genome sequence database. In another embodiment, the ambiguous residues in a SEQ ID NO are determined based on the sequence of the corresponding Entrez accession number. In yet another embodiment, the ambiguous residues are determined by re-sequencing the SEQ ID NO. In general, each “n” position in a SEQ ID NO represents at least one nucleotide selected from a, t, g, and c, or contains no nucleotide residue.

TABLE 3
Qualifiers and Corresponding CPSs and SEQ ID NOs

| | | |
|---|---|---|
| Qualifier | CPS | SEQ ID NO |

| | | |
|---|---|---|
| 34768_at | 1 | nucleotides 1777 to 2353 of SEQ ID NO: 1 |
| 36097_at | 2 | nucleotides 1273 to 1774 of SEQ ID NO: 2 |
| 36675_r_at | 3 | nucleotides 338 to 744 of SEQ ID NO: 3 |
| 37940_f_at | 4 | the complement of nucleotides 305 to 502 of SEQ ID |
| | | NO:4 |
| 34338_at | 5 | nucleotides 659 to 995 of SEQ ID NO: 5 |
| 38991_at | 6 | the complement of nucleotides 382 to 527 of SEQ ID |
| | | NO:6 |
| 38976_at | 7 | nucleotides 1107 to 1517 of SEQ ID NO: 7 |
| 37905_r_at | 8 | nucleotides 1451 to 1961 of SEQ ID NO: 8 |
| 38780_at | 9 | nucleotides 567 to 1095 of SEQ ID NO: 9 |
| 41215_s_at | 10 | nucleotides 719 to 1049 of SEQ ID NO: 10 |
| 35956_s_at | 11 | nucleotides 1360 to 1973 of SEQ ID NO: 11 |
| 32332_at | 13 | nucleotides 1190 to 1720 of SEQ ID NO: 12 |
| 41551_at | 14 | the complement of nucleotides 223 to 388 of SEQ ID |
| | | NO: 13 |
| 39332_at | 15 | nucleotides 1091 to 1182 of SEQ ID NO: 14 |
| 40778_at | 16 | nucleotides 498 to 938 of SEQ ID NO: 15 |
| 32232_at | 17 | nucleotides 484 to 963 of SEQ ID NO: 16 |
| 34310_at | 18 | SEQ ID NO: 17 |
| 1184_at | 19 | nucleotides 197 to 743 of SEQ ID NO: 18 |
| 35688_g_at | 20 | SEQ ID NO: 19 |
| 38981_at | 21 | SEQ ID NO: 20 |
| 37391_at | 23 | nucleotides 1022-1395 of SEQ ID NO: 21 |
| 39593_at | 24 | the complement of nucleotides 14 to 199 of SEQ ID NO: |
| | | 22 |
| 32505_at | 25 | nucleotides 4 to 223 of SEQ ID NO: 23 |
| AFFX- | 26 | SEQ ID NO: 24 |
| M27830_5_at | | |
| 35666_at | 27 | nucleotides 3050 to 3530 of SEQ ID NO: 25 |
| 39061_at | 28 | nucleotides 425 to 948 of SEQ ID NO: 26 |
| 39748_at | 29 | nucleotides 2675 to 3052 of SEQ ID NO: 27 |
| 40505_at | 30 | the complement of nucleotides 52 to 286 of SEQ ID NO: |
| | | 28 |
| 38597_f_at | 31 | nucleotides 2196 to 2257 of SEQ ID NO: 29 |
| 39545_at | 32 | SEQ ID NO: 30 |
| 34268_at | 33 | nucleotides 1088 to 1530 of SEQ ID NO: 31 |
| 38816_at | 34 | nucleotides 3244 to 3649 of SEQ ID NO: 32 |
| 38732_at | 35 | nucleotides 762-1229 of SEQ ID NO: 33 |
| 40607_at | 36 | nucleotides 5022-5382 of SEQ ID NO: 34 |
| 37200_at | 37 | nucleotides 1406-1932 of SEQ ID NO: 35 |
| 283_at | 38 | nucleotides 1426_1965 of SEQ ID NO: 36 |
| 40757_at | 39 | nucleotides 393-818 of SEQ ID NO: 37 |
| 384_at | 41 | SEQ ID NO: 38 |
| 40814_at | 42 | nucleotides 1123-1247 of SEQ ID NO: 39 |
| 37027_at | 43 | SEQ ID NO: 40 |
| 1760_s_at | 44 | nucleotides 2049-2393 of SEQ ID NO: 41 |
| 1292_at | 45 | nucleotides 1126-1654 of SEQ ID NO: 42 |
| 38287_at | 46 | the complement of nucleotides 8-451 of SEQ ID NO: 43 |
| 41591_at | 47 | the complement of nucleotides 39-547 of SEQ ID NO: |
| | | 44 |
| 32475_at | 48 | nucleotides 1845-2329 of SEQ ID NO: 45 |
| 40782_at | 49 | nucleotides 886-1289 of SEQ ID NO: 46 |
| 503_at | 50 | nucleotides 13-342 of SEQ ID NO: 47 |
| 875_g_at | 51 | nucleotides 562-886 of SEQ ID NO: 48 |
| 37185_at | 52 | nucleotides 1311-1761 of SEQ ID NO: 49 |
| 32282_at | 53 | nucleotides 2851-3265 of SEQ ID NO: 50 |
| 40981_at | 54 | nucleotides 2661-3257 of SEQ ID NO: 51 |
| 34782_at | 55 | the complement of nucleotides 529-952 of SEQ ID NO: |
| | | 52 |
| 37373_at | 56 | nucleotides 1339-1771 of SEQ ID NO: 53 |
| 40018_at | 57 | nucleotides 5780 to 6213 of SEQ ID NO: 54 |
| 31638_at | 58 | SEQ ID NO: 55 |
| 38191_at | 59 | the complement of nucleotides 171-451 of SEQ ID NO: |
| | | 56 |
| 33396_at | 60 | SEQ ID NO: 57 |
| 38104_at | 61 | SEQ ID NO: 58 |
| 32193_at | 62 | SEQ ID NO: 59 |
| 38350_f_at | 63 | SEQ ID NO: 60 |
| 1985_s_at | 64 | nucleotides 90-510 of SEQ ID NO: 61 |
| 38598_at | 65 | the complement of nucleotides 149-213 of SEQ ID NO: |
| | | 62 |
| 41446_f_at | 66 | the complement of nucleotides 28-303 of SEQ ID NO: |
| | | 63 |
| 41436_at | 67 | nucleotides 4687-4907 of SEQ ID NO: 64 |
| 36672_at | 68 | nucleotides 1509-1977 of SEQ ID NO: 65 |
| 38717_at | 70 | nucleotides 1355 to 1737 of SEQ ID NO: 66 |
| 32183_at | 71 | nucleotides 2195 to 2651 of SEQ ID NO: 67 |
| 32737_at | 72 | nucleotides 183 to 669 of SEQ ID NO: 68 |
| 40140_at | 73 | nucleotides 2828 to 3356 of SEQ ID NO: 69 |
| 40818_at | 74 | nucleotides 5138-5360 of SEQ ID NO: 70 |
| 34787_at | 75 | nucleotides 3428-3616 of SEQ ID NO: 71 |
| 38652_at | 76 | nucleotides 829-1333 of SEQ ID NO: 72 |
| 41812 s_at | 77 | nucleotides 3618-4192 of SEQ ID NO: 73 |
| 31622_f_at | 78 | SEQ ID NO: 74 |
| 40828_at | 79 | nucleotides 4472-4977 of SEQ ID NO: 75 |
| 39693_at | 80 | the complement of nucleotides 55-554 of SEQ ID NO: |
| | | 76 |
| 40994_at | 81 | nucleotides 2004 to 2502 of SEQ ID NO: 77 |
| 39802_at | 83 | nucleotides 444 to 991 of SEQ ID NO: 78 |
| 40567_at | 84 | nucleotides 3868 to 3916 of SEQ ID NO: 79 |
| 38518_at | 85 | nucleotides 3841-4076 of SEQ ID NO: 80 |
| 1368_at | 87 | nucleotides 4459-4885 of SEQ ID NO: 81 |
| 41653_at | 88 | nucleotides 110125 to 110701 of SEQ ID NO: 82 |
| 41669_at | 89 | nucleotides 4596 to 5049 of SEQ ID NO: 83 |
| 36488_at | 90 | nucleotides 4959 to 5449 of SEQ ID NO: 84 |
| 1005_at | 91 | nucleotides 784 to 1318 of SEQ ID NO: 85 |
| 36495_at | 92 | SEQ ID NO: 86 |
| 40579_at | 93 | SEQ ID NO: 87 |
| 36607_at | 94 | the complement of 201545 to 202131 of SEQ ID NO: 88 |
| 34311_at | 95 | nucleotides 360 to 722 of SEQ ID NO: 89 |
| 35785_at | 96 | nucleotides 160 to 436 of SEQ ID NO: 90 |
| 40622_r_at | 97 | SEQ ID NO: 91 |
| 33777_at | 98 | SEQ ID NO: 92 |
| 38220_at | 99 | nucleotides 3894 to 4357 of SEQ ID NO: 93 |
| 1665_s_at | 100 | SEQ ID NO: 94 |
| 1693_s_at | 101 | SEQ ID NO: 95 |
| 32612_at | 102 | nucleotides 2033 to 2405 of SEQ ID NO: 96 |
| 41045_at | 103 | nucleotides 1546 to 1973 of SEQ ID NO: 97 |
| 37233_at | 104 | SEQ ID NO: 98 |
| 37967_at | 105 | nucleotides 278 to 635 of SEQ ID NO: 99 |
| 2049_s_at | 106 | nucleotides 842 to 1443 of SEQ ID NO: 100 |
| 39997_at | 107 | SEQ ID NO: 101 |
| 41332_at | 108 | nucleotides 635 to 1169 of SEQ ID NO: 102 |
| 115_at | 109 | nucleotides 3083-3605 of SEQ ID NO: 103 |
| 40964_at | 110 | SEQ ID NO: 104 |
| 35303_at | 111 | SEQ ID NO: 105 |
| 40742_at | 112 | nucleotides 1661 to 1912 of SEQ ID NO: 106 |
| 37955_at | 113 | nucleotides 669 to 730 of SEQ ID NO: 107 |
| 39698_at | 114 | nucleotides 599 to 1068 of SEQ ID NO: 108 |
| 32586_at | 115 | nucleotides 5059 to 5585 of SEQ ID NO: 109 |
| 40159_r_at | 116 | nucleotides 970-1341 of SEQ ID NO: 110 |
| 32635_at | 117 | nucleotides 3240 to 3424 of SEQ ID NO: 111 |
| 35840_at | 118 | nucleotides 639 to 1163 of SEQ ID NO: 112 |
| 37661_at | 119 | nucleotides 4061-4398 of SEQ ID NO: 113 |
| 411_i_at | 120 | nucleotides 281 to 318 of SEQ ID NO: 114 |
| 35012_at | 121 | nucleotides 1070 to 1667 of SEQ ID NO: 115 |
| 38760_f_at | 122 | nucleotides 1014 to 1263 of SEQ ID NO: 116 |
| 36474_at | 123 | nucleotides 3881 to 4038 of SEQ ID NO: 117 |
| 41440_at | 124 | nucleotides 655 to 933 of SEQ ID NO: 118 |
| 39953_i_at | 125 | nucleotides 5549 to 5598 of SEQ ID NO: 119 |
| 245_at | 126 | nucleotides 1795 to 2323 of SEQ ID NO: 120 |
| 37181_at | 127 | nucleotides 375 to 947 of SEQ ID NO: 121 |
| 39799_at | 128 | SEQ ID NO: 122 |
| 39320_at | 129 | nucleotides 569 to 1121 of SEQ ID NO: 123 |
| 794_at | 130 | nucleotides 1484 to 2024 of SEQ ID NO: 124 |
| 36091_at | 131 | nucleotides 1806 to 1973 of SEQ ID NO: 125 |
| 37187_at | 133 | nucleotides 504-946 of SEQ ID NO: 126 |
| 38338_at | 134 | the complement of nucleotides 61 to 470 of SEQ ID NO: |
| | | 127 |
| 34760_at | 135 | nucleotides 3404 to 3694 of SEQ ID NO: 128 |
| 33133_at | 136 | SEQ ID NO: 129 |
| 32904_at | 137 | SEQ ID NO: 130 |
| 37359_at | 138 | nucleotides 798 to 1300 of SEQ ID NO: 131 |
| 40485_at | 139 | the complement of nucleotides 35-188 of SEQ ID NO: |
| | | 132 |
| 37215_at | 140 | SEQ ID NO: 133 |
| 40274_at | 141 | nucleotides 561-736 of SEQ ID NO: 134 |
| 41174_at | 143 | nucleotides 3461 to 4011 of SEQ ID NO: 135 |
| 1715_at | 144 | nucleotides 1162 to 1402 of SEQ ID NO: 136 |
| 41503_at | 145 | nucleotides 3580 to 4066 of SEQ ID NO: 137 |
| 40390_at | 146 | nucleotides 978 to 1393 of SEQ ID NO: 138 |
| 40811_at | 147 | nucleotides 4475 to 4934 of SEQ ID NO: 139 |
| 31499_s_at | 148 | nucleotides 251-854 of SEQ ID NO: 140 |
| 34023_at | 149 | nucleotides 570 to 1026 of SEQ ID NO: 141 |
| 1125_s_at | 150 | SEQ ID NO: 142 |
| 36617_at | 151 | nucleotides 691 to 819 of SEQ ID NO: 143 |
| 36337_at | 152 | the complement of nucleotides 54-372 of SEQ ID NO: |
| | | 144 |
| 36161_at | 153 | nucleotides 5172 to 5682 of SEQ ID NO: 145 |
| 1433_g_at | 154 | nucleotides 1907 to 2267 of SEQ ID NO: 146 |
| 39043_at | 155 | nucleotides 967 to 1366 of SEQ ID NO: 147 |
| 37311_at | 156 | SEQ ID NO: 148 |
| 37009_at | 157 | the complement of nucleotides 3527-3999 of SEQ ID |
| | | NO: 149 |
| 33942_s_at | 158 | nucleotides 3457 to 3843 of SEQ ID NO: 150 |
| 39641_at | 159 | nucleotides 759 to 1194 of SEQ ID NO: 151 |
| 529_at | 160 | nucleotides 1995 to 2319 of SEQ ID NO: 152 |
| 32199_at | 161 | nucleotides 4778 to 5059 of SEQ ID NO: 153 |
| 1426_at | 162 | nucleotides 2046 to 2334 of SEQ ID NO: 154 |
| 31851_at | 163 | nucleotides 802 to 1201 of SEQ ID NO: 155 |
| 34378_at | 164 | nucleotides 1217-1314 of SEQ ID NO: 156 |
| 36173_r_at | 165 | nucleotides 4756 to 4950 of SEQ ID NO: 157 |
| 35275_at | 166 | nucleotides 3552 to 3973 of SEQ ID NO: 158 |
| 41184_s_at | 168 | SEQ ID NO: 159 |
| 38391_at | 170 | nucleotides 750 to 1184 of SEQ ID NO: 160 |
| 39829_at | 171 | nucleotides 799 to 1337 of SEQ ID NO: 161 |
| 37587_at | 172 | nucleotides 599 to 1167 of SEQ ID NO: 162 |
| 34022_at | 173 | nucleotides 426-993 of SEQ ID NO: 163 |
| 34188_at | 175 | nucleotides 1283 to 1708 of SEQ ID NO: 164 |
| 37647_at | 176 | nucleotides 1702 to 2244 of SEQ ID NO: 165 |
| 40089_at | 177 | nucleotides 1189 to 1234 of SEQ ID NO: 166 |
| 39982_r_at | 178 | nucleotides 1075 to 1489 of SEQ ID NO: 167 |
| 32202_at | 179 | nucleotides 1928 to 2496 of SEQ ID NO: 168 |
| 35036_at | 180 | nucleotides 2895 to 3261 of SEQ ID NO: 169 |
| 906_at | 181 | nucleotides 1993 to 2533 of SEQ ID NO: 170 |
| 36033_at | 182 | nucleotides 562 to 916 of SEQ ID NO: 171 |
| 36766_at | 183 | nucleotides 167-666 of SEQ ID NO: 172 |
| 38893_at | 184 | nucleotides 29281 to 29344 of SEQ ID NO: 173 |
| 37374_at | 185 | nucleotides 1465-1939 of SEQ ID NO: 174 |
| 36599_at | 186 | SEQ ID NO: 175 |
| 464_s_at | 187 | nucleotides 869-1048 of SEQ ID NO: 176 |
| 32533_s_at | 188 | nucleotides 91-464 of SEQ ID NO: 177 |
| 36496_at | 189 | nucleotides 1061-1514 of SEQ ID NO: 178 |
| 36280_at | 190 | nucleotides 535-953 of SEQ ID NO: 179 |
| 38126_at | 191 | SEQ ID NO: 180 |
| 37011_at | 192 | nucleotides 37 to 460 of SEQ ID NO: 181 |
| 39166_s_at | 193 | nucleotides 1583-1790 of SEQ ID NO: 182 |
| 1825_at | 195 | nucleotides 6960-7542 of SEQ ID NO: 183 |
| 41577_at | 196 | nucleotides 5804-6213 of SEQ ID NO: 184 |
| 33161_at | 197 | the complement of nucleotides 1 to 270 of SEQ ID NO: |
| | | 185 |
| 31438_s_at | 198 | nucleotides 3247-3720 of SEQ ID NO: 186 |
| 36372_at | 199 | nucleotides 2437-3029 of SEQ ID NO: 187 |
| 2094 s_at | 200 | nucleotides 2713-3294 of SEQ ID NO: 188 |
| 32977_at | 201 | nucleotides 2074-2206 of SEQ ID NO: 189 |
| 32264_at | 202 | nucleotides 493-755 of SEQ ID NO: 190 |
| 32184_at | 203 | nucleotides 1691-2175 of SEQ ID NO: 191 |
| 35674_at | 204 | nucleotides 3798-4194 of SEQ ID NO: 192 |
| 41249_at | 205 | the complement of nucleotides 63056-63481 of SEQ ID |
| | | NO: 193 |
| 36762_at | 206 | nucleotides 1129-1630 of SEQ ID NO: 194 |
| 37146_at | 207 | nucleotides 5897-6262 of SEQ ID NO: 195 |
| 867_s_at | 208 | nucleotides 1821-1945 of SEQ ID NO: 196 |
| 33500_i_at | 209 | nucleotides 1253-1296 of SEQ ID NO: 197 |
| 1575_at | 210 | nucleotides 4240-4585 of SEQ ID NO: 198 |
| 40088_at | 211 | nucleotides 6655-7207 of SEQ ID NO: 199 |
| 37742_at | 213 | nucleotides 1946-2278 of SEQ ID NO: 200 |
| 35992_at | 214 | nucleotides 1207-1652 of SEQ ID NO: 201 |
| 35710_s_at | 216 | nucleotides 63-630 of SEQ ID NO: 202 |
| 39119_s_at | 217 | nucleotides 408-727 of SEQ ID NO: 203 |
| 34857_at | 218 | nucleotides 1269-1779 of SEQ ID NO: 204 |
| 41198_at | 219 | nucleotides 1589-2106 of SEQ ID NO: 205 |
| 34476_r_at | 220 | nucleotides 4012-4358 of SEQ ID NO: 206 |
| 35772_at | 221 | SEQ ID NO: 207 |
| 34660_at | 222 | the complement of nucleotides 40-615 of SEQ ID NO: |
| | | 208 |
| 35648_at | 223 | SEQ ID NO: 209 |
| AFFX-HUMRGE/ | 225 | nucleotides 62-1969 of SEQ ID NO: 210 |
| M10098_3_at | | |
| 31324_at | 226 | nucleotides 51-308 of SEQ ID NO: 211 |
| 1395_at | 227 | nucleotides 433-1039 of SEQ ID NO: 212 |
| 32066_g_at | 228 | SEQ ID NO: 213 |
| 1107_s_at | 229 | nucleotides 7-602 of SEQ ID NO: 214 |
| 1097_s_at | 230 | SEQ ID NO: 215 |
| 35591_at | 231 | nucleotides 1711-2087 of SEQ ID NO: 216 |
| 32815_at | 232 | the complement of nucleotides 49-265 of SEQ ID NO: |
| | | 217 |
| 36231_at | 233 | SEQ ID NO: 218 |
| 38823_s_at | 234 | the complement of nucleotides 57-557 of SEQ ID NO: |
| | | 219 |
| 32618_at | 235 | nucleotides 489-909 of SEQ ID NO: 220 |
| 2092_s_at | 236 | nucleotides 824-1229 of SEQ ID NO: 221 |
| 37184_at | 237 | nucleotides 1631-2037 of SEQ ID NO: 222 |
| 37120_at | 238 | nucleotides 1870-2379 of SEQ ID NO: 223 |
| 1237_at | 239 | nucleotides 658-1204 of SEQ ID NO: 224 |
| 37310_at | 241 | nucleotides 6668-7083 of SEQ ID NO: 225 |
| 40541_at | 242 | nucleotides 1030-1412 of SEQ ID NO: 226 |
| 31346_at | 244 | nucleotides 647-1187 of SEQ ID NO: 227 |
| 37875_at | 245 | nucleotides 2330-2672 of SEQ ID NO: 228 |
| 38125_at | 246 | nucleotides 2357-2473 of SEQ ID NO: 229 |
| 859_at | 247 | nucleotides 4693-5071 of SEQ ID NO: 230 |
| 35792_at | 249 | nucleotides 884-1174 of SEQ ID NO: 231 |
| 34946_at | 250 | nucleotides 386-895 of SEQ ID NO: 232 |
| 33956_at | 253 | nucleotides 90-594 of SEQ ID NO: 233 |
| 32975_g_at | 254 | nucleotides 18770-18875 of SEQ ID NO: 234 |
| 38582_at | 255 | the complement of nucleotides 40 to 288 of SEQ ID NO: |
| | | 235 |
| 181_g_at | 256 | nucleotides 1464-1864 of SEQ ID NO: 236 |
| 37864_s_at | 257 | nucleotides 1108-1568 of SEQ ID NO: 237 |
| 34704_r_at | 258 | SEQ ID NO: 238 |
| 32163_f_at | 259 | SEQ ID NO: 239 |
| 41189_at | 260 | nucleotides 1161-1608 of SEQ ID NO: 240 |
| 41698_at | 261 | nucleotides 45240-45830 of SEQ ID NO: 241 |
| 40456_at | 262 | nucleotides 733-1310 of SEQ ID NO: 242 |
| 41227_at | 263 | nucleotides 35752-35804 of SEQ ID NO: 243 |
| 36100_at | 264 | nucleotides 2613-3118 of SEQ ID NO: 244 |
| 36411_s_at | 265 | nucleotides 1623-2080 of SEQ ID NO: 245 |
| 41167_at | 266 | nucleotides 1596-2100 of SEQ ID NO: 246 |
| 41819_at | 267 | nucleotides 2242-2578 of SEQ ID NO: 247 |
| 38389_at | 268 | nucleotides 960-1377 of SEQ ID NO: 248 |
| 37975_at | 269 | nucleotides 3684-4231 of SEQ ID NO: 249 |
| 39640_at | 270 | nucleotides 2415-2938 of SEQ ID NO: 250 |
| 38010_at | 271 | nucleotides 1044-1494 of SEQ ID NO: 251 |
| 32675_at | 272 | nucleotides 972-1411 of SEQ ID NO: 252 |
| 1531_at | 273 | nucleotides 1691-1891 of SEQ ID NO: 253 |
| 40646_at | 274 | nucleotides 2496-3012 of SEQ ID NO: 254 |
| 39474_s_at | 275 | nucleotides 22-507 of SEQ ID NO: 255 |
| 34498_at | 276 | nucleotides 1434-1983 of SEQ ID NO: 256 |
| 37654_at | 277 | nucleotides 1580-2043 of SEQ ID NO: 257 |
| 408_at | 278 | nucleotides 1412-1851 of SEQ ID NO: 258 |
| 38340_at | 279 | nucleotides 4103-4434 of SEQ ID NO: 259 |
| 1937_at | 280 | SEQ ID NO: 260 |
| 41638_at | 281 | nucleotides 1696-1922 of SEQ ID NO: 261 |
| 36138_at | 282 | nucleotides 943-1477 of SEQ ID NO: 262 |
| 32407_f_at | 283 | nucleotides 3-280 of SEQ ID NO: 263 |
| 38131_at | 284 | nucleotides 1240-1517 of SEQ ID NO: 264 |
| 39775_at | 285 | nucleotides 18180-18249 of SEQ ID NO: 265 |
| 318_at | 286 | nucleotides 601-838 of SEQ ID NO: 266 |
| 39402_at | 287 | nucleotides 927-1473 of SEQ ID NO: 267 |
| 36543_at | 288 | nucleotides 1723-2013 of SEQ ID NO: 268 |
| 1788_s_at | 289 | nucleotides 1622-2058 of SEQ ID NO: 269 |
| 34702_f_at | 290 | nucleotides 534-575 of SEQ ID NO: 270 |
| 40951_at | 291 | nucleotides 1860-2099 of SEQ ID NO: 271 |
| 35313_at | 292 | nucleotides 6412-6826 of SEQ ID NO: 272 |
| 1520_s_at | 293 | SEQ ID NO: 273 |
| 40171_at | 295 | SEQ ID NO: 274 |
| 32162_r_at | 296 | nucleotides 420-480 of SEQ ID NO: 275 |
| 1369_s_at | 297 | nucleotides 3645-4005 of SEQ ID NO: 276 |
| 34490_f_at | 298 | SEQ ID NO: 277 |
| 36710_at | 300 | nucleotides 74-557 of SEQ ID NO: 278 |
| 37220_at | 301 | SEQ ID NO: 279 |
| 32003_at | 302 | nucleotides 1144-1487 of SEQ ID NO: 280 |
| 1667_s_at | 303 | nucleotides 1531-1603 of SEQ ID NO: 281 |
| 731_f_at | 304 | SEQ ID NO: 282 |
| 39448_r_at | 305 | the complement of nucleotides 46-344 of SEQ ID NO: |
| | | 283 |
| 40385_at | 306 | nucleotides 207-742 of SEQ ID NO: 284 |
| 37603_at | 307 | nucleotides 1184-1653 of SEQ ID NO: 285 |
| 41046_s_at | 308 | nucleotides 5551-6046 of SEQ ID NO: 286 |
| 37456_at | 309 | SEQ ID NO: 287 |
| 31828_r_at | 310 | nucleotides 1750 to 2274 of SEQ ID NO: 288 |

[0043] TABLE 4
SEQ ID Nos and Corresponding Entrez Accession Nos

| | | |
|---|---|---|
| SEQ ID NO | Entrez Accession No. | Reported Source of Entrez Sequence |

| | | |
|---|---|---|
| 1 | AL080080 | Homo sapiens mRNA; cDNA |
| | | DKFZp564E1962 (from clone |
| | | DKFZp564E1962) |
| 2 | M62831 | Human transcription factor ETR101 |
| | | mRNA |
| 3 | J03191 | Human profilin mRNA |
| 4 | AA806768 | |
| 5 | D49738 | Human cytoskeleton associated protein |
| | | (CG22) mRNA |
| 6 | U55980 | |
| 7 | D44497 | Human mRNA for actin binding protein |
| | | p57 |
| 8 | X66436 | H.sapiens hsr1 mRNA |
| 9 | J04794 | Human aldehyde reductase mRNA |
| 10 | D13891 | Human mRNA for Id-2H |
| 11 | U18467 | Human pregnancy-specific beta 1- |
| | | glycoprotein 7 (PSG7) mRNA |
| 12 | X69433 | H.sapiens mRNA for mitochondrial |
| | | isocitrate dehydrogenase (NADP⁺) |
| 13 | AW044624 | |
| 14 | AF035316 | Homo sapiens clone 23678 mRNA |
| 15 | AF035555 | Homo sapiens 17beta-hydroxysteroid |
| | | dehydrogenase type 10/short chain L-3- |
| | | hydroxyacyl-CoA dehydrogenase |
| | | (HSD17B10/SCHAD) mRNA; nuclear |
| | | gene for mitochondrial product. |
| 16 | AF047181 | Homo sapiens NADH-ubiquinone |
| | | oxidoreductase subunit CI-SGDH mRNA |
| 18 | D45248 | Human mRNA for proteasome activator |
| | | hPA28 subunit beta |
| 21 | X12451 | Human mRNA for pro-cathepsin L (major |
| | | excreted protein MEP) |
| 22 | AI432401 | |
| 23 | W28652 | |
| 24 | M27830 | Human 28S ribosomal RNA gene |
| 25 | U38276 | Human semaphorin III family homolog |
| | | mRNA |
| 26 | D28137 | Human mRNA for BST-2 |
| 27 | AL050021 | Homo sapiens mRNA; cDNA |
| | | DKFZp564D016 (from clone |
| | | DKFZp564D016) |
| 28 | AA883502 | |
| 29 | D50402 | Human mRNA for NRAMP1 |
| 31 | X91809 | H.sapiens mRNA for GAIP protein. |
| 32 | AF095791 | Homo sapiens TACC2 protein (TACC2) |
| | | mRNA |
| 33 | X91788 | H.sapiens mRNA for Icln protein |
| 34 | U97105 | Homo sapiens N2A3 mRNA |
| 35 | J04162 | Human leukocyte IgG receptor (Fc- |
| | | gamma-R) mRNA |
| 36 | L16842 | Human ubiquinol cytochrome-c reductase |
| | | core I protein mRNA |
| 37 | M18737 | Human Hanukah factor serine protease |
| | | (HuHF) mRNA |
| 39 | L40586 | Homo sapiens iduronate-2-sulphatase |
| | | (IDS) mRNA |
| 41 | D11327 | Human mRNA for protein-tyrosine |
| | | phosphatase |
| 42 | L11329 | Homo sapiens protein tyrosine |
| | | phosphatase (PAC-1) mRNA |
| 43 | AA808961 | |
| 44 | AI652978 | |
| 45 | AF025529 | Homo sapiens leucocyte immunoglobulin- |
| | | like receptor-6b (LIR-6) mRNA |
| 46 | AF061741 | Homo sapiens retinal short-chain |
| | | dehydrogenase/reductase retSDR1 mRNA |
| 47 | U37690 | Human RNA polymerase II subunit |
| | | (hsRPB10) mRNA |
| 48 | M26683 | Human interferon gamma treatment |
| | | inducible mRNA |
| 49 | Y00630 | Human mRNA for Arg-Serpin |
| | | (plasminogen activator-inhibitor 2, PAI-2) |
| 50 | U66047 | Homo sapiens clone Z′3-1 placenta |
| | | expressed mRNA from chromosome X |
| 51 | U00930 | Human clone C4E 1.63 (CAC)n/(GTG)n |
| | | repeat-containing mRNA |
| 52 | AL021938 | Homo sapiens DNA sequence from PAC |
| | | 232K4 on chromosome 6p22.3. Contains |
| | | the JUMONJI gene for a hypothetical |
| | | 141.7 kD protein. Contains ESTs, STSs, a |
| | | CA repeat polymorphism and genomic |
| | | marker D6S260′ |
| 53 | U27460 | Human uridine diphosphoglucose |
| | | pyrophosphorylase mRNA |
| 54 | AB007870 | Homo sapiens KIAA0410 mRNA |
| 56 | AI040181 | |
| 61 | X73066 | H.sapiens NM23-H1 mRNA |
| 62 | AI679353 | |
| 64 | AJ224901 | Homo sapiens mRNA for ZNF198 protein. |
| 65 | L13977 | Human prolylcarboxypeptidase mRNA |
| 66 | AL050159 | Homo sapiens mRNA; cDNA |
| | | DKFZp586A0522 (from clone |
| | | DKFZp586A0522) |
| 67 | M74002 | Human arginine-rich nuclear protein |
| | | mRNA |
| 68 | M64595 | Human small G protein (Gx) mRNA |
| 69 | D76444 | Homo sapiens hkf-1 mRNA |
| 70 | D14041 | Homo sapiens mRNA for H-2K binding |
| | | factor-2 |
| 71 | X93209 | H.sapiens mRNA for NRD1 convertase |
| 72 | AF070644 | Homo sapiens clone 24742 mRNA |
| | | sequence |
| 73 | AB020713 | Homo sapiens mRNA for KIAA0906 |
| | | protein |
| 75 | D63476 | Human mRNA for KIAA0142 gene |
| 76 | N53547 | |
| 77 | L15388 | Human G protein-coupled receptor kinase |
| | | (GRK5) mRNA |
| 78 | X72308 | Homo sapiens mRNA for monocyte |
| | | chemotactic protein-3 (MCP-3) |
| 79 | X01703 | Human gene for alpha-tubulin (b alpha 1) |
| 80 | Y18004 | Homo sapiens mRNA for SCML2 protein |
| 81 | M27492 | Human interleukin 1 receptor mRNA |
| 82 | AL008729 | Human DNA sequence from PAC 257A7 |
| | | on chromosome 6p24 |
| 83 | D83776 | Human mRNA for KIAA0191 gene |
| 84 | AB011542 | Homo sapiens mRNA for MEGF9 |
| 85 | X68277 | H.sapiens CL 100 mRNA for protein |
| | | tyrosine phosphatase |
| 88 | Z99716 | Human DNA sequence from clone CTA- |
| | | 250D10 on chromosome 22 Contains the |
| | | genes for SREBF2 (sterol regulatory |
| | | element binding transcription factor 2), |
| | | NAGA (alpha-N-acetylgalactosaminidase), |
| | | a gene similar to neuronal-specific septin |
| | | 3, a pseudogene similar to ANT2 (adenine |
| | | nucleotide translocator 2), 2 mRNAs based |
| | | on ESTs, a genomic marker D22S1178, a |
| | | CA repeat polymorpism, ESTs and a CpG |
| | | island |
| 89 | X76648 | H.sapiens mRNA for glutaredoxin |
| 90 | W28281 | |
| 93 | U20938 | Human lymphocyte dihydropyrimidine |
| | | dehydrogenase mRNA |
| 94 | M63193 | Human platelet-derived endothelial cell |
| | | growth factor mRNA |
| 96 | X04412 | Human mRNA for plasma gelsolin |
| 97 | U77643 | Homo sapiens K12 protein precursor |
| | | mRNA |
| 99 | AF000424 | Homo sapiens LST1 mRNA, cLST1/C |
| | | splice variant |
| 100 | M29039 | Human transactivator (jun-B) gene |
| 102 | D38251 | Homo sapiens mRNA for RPB5 (XAP4) |
| 103 | X14787 | Human mRNA for thrombospondin |
| 106 | M16591 | Human hemopoietic cell protein-tyrosine |
| | | kinase (HCK) gene |
| 107 | AB015631 | Homo sapiens mRNA for type II |
| | | membrane protein |
| 108 | U51712 | |
| 109 | D86971 | Human mRNA for KIAA0217 gene |
| 110 | M55067 | Human 47-kD autosomal chronic |
| | | granulomatous disease protein mRNA |
| 111 | AB029036 | Homo sapiens mRNA for KIAA1113 |
| | | protein |
| 112 | AL050060 | Homo sapiens mRNA; cDNA |
| | | DKFZp566H073 (from clone |
| | | DKFZp566H073) |
| 113 | J04027 | Human plasma membrane Ca2⁺ pumping |
| | | ATPase mRNA |
| 114 | X57351 | Human 1-8D gene from interferon- |
| | | inducible gene family |
| 115 | M81750 | H.sapiens myeloid cell nuclear |
| | | differentiation antigen mRNA |
| 116 | U90546 | Human butyrophilin (BTF4) mRNA |
| 117 | AB018319 | Homo sapiens mRNA for KIAA0776 |
| | | protein |
| 118 | D82061 | Homo sapiens mRNA for a member of the |
| | | short-chain alcohol dehydrogenase family |
| 119 | AB014528 | Homo sapiens mRNA for KIAA0628 |
| | | protein |
| 120 | M25280 | Human lymph node homing receptor |
| | | mRNA |
| 121 | X76538 | H.sapiens Mpv17 mRNA |
| 123 | U13697 | Human interleukin 1-beta converting |
| | | enzyme isoform beta (IL1BCE) mRNA |
| 124 | X62055 | H.sapiens PTP1C mRNA for protein |
| | | tyrosine phosphatase 1C |
| 125 | AF051323 | Homo sapiens Src-associated adaptor |
| | | protein (SAPS) mRNA |
| 126 | M36820 | Human cytokine (GRO-beta) mRNA |
| 127 | AI201108 | |
| 128 | D14664 | Human mRNA for KIAA0022 gene |
| 131 | D14658 | Human mRNA for KIAA0102 gene |
| 132 | AA176780 | |
| 134 | U48213 | Human D-site binding protein gene |
| 135 | AF012086 | Homo sapiens Ran binding protein 2 |
| | | (RanBP2alpha) mRNA |
| 136 | U37518 | Human TNF-related apoptosis inducing |
| | | ligand TRAIL mRNA |
| 137 | AB020661 | Homo sapiens mRNA for KIAA0854 |
| | | protein |
| 138 | J05037 | Human serine dehydratase mRNA |
| 139 | AB011148 | Homo sapiens mRNA for KIAA0576 |
| | | protein |
| 140 | X16863 | Human Fc-gamma RIII-1 cDNA for Fc |
| | | gamma receptor III-1 (CD 16) |
| 141 | X06948 | Human mRNA for high affinity IgE |
| | | receptor alpha-subunit (FcERI) |
| 143 | X77956 | H.sapiens Id1 mRNA |
| 144 | AI760801 | |
| 145 | M34175 | Human beta adaptin mRNA |
| 146 | U68019 | Homo sapiens mad protein homolog |
| | | (hMAD-3) mRNA |
| 147 | AF006084 | Homo sapiens Arp2/3 protein complex |
| | | subunit p41-Arc (ARC41) mRNA |
| 149 | AL035079 | Human DNA sequence from clone 53C18 |
| | | on chromosome 11p12-13 |
| 150 | AF004563 | Homo sapiens hUNC18b alternatively |
| | | spliced mRNA |
| 151 | X52486 | Human mRNA for uracil-DNA |
| | | glycosylase |
| 152 | U15932 | Human dual-specificity protein |
| | | phosphatase mRNA |
| 153 | U20489 | Human glomerular epithelial protein 1 |
| | | (GLEPP1) mRNA |
| 154 | D89077 | Homo sapiens mRNA for Src-like adapter |
| | | protein |
| 155 | AJ224819 | Homo sapiens mRNA for candidate tumor |
| | | suppressor involved in B-CLL |
| 156 | X97324 | H.sapiens mRNA for adipophilin |
| 157 | AF002163 | Homo sapiens delta-adaptin mRNA |
| 158 | AL050025 | Homo sapiens mRNA; cDNA |
| | | DKFZp564D066 (from clone |
| | | DKFZp564D066) |
| 160 | M94345 | Homo sapiens macrophage capping protein |
| | | mRNA |
| 161 | AB016811 | Homo sapiens mRNA for ADP |
| | | ribosylation factor-like protein |
| 162 | S43855 | recoverin photoreceptor protein [human, |
| | | retina, mRNA] |
| 163 | M36821 | Human cytokine (GRO-gamma) mRNA |
| 164 | AF070606 | Homo sapiens clone 24411 mRNA |
| | | sequence |
| 165 | M62840 | Human acyloxyacyl hydrolase mRNA |
| 166 | AJ224442 | Homo sapiens mRNA for putative |
| | | methyltransferase |
| 167 | D13265 | Human mRNA for macrophage scavenger |
| | | receptor type II |
| 168 | U67322 | Human HBV associated factor (XAP4) |
| | | mRNA |
| 169 | U94333 | Human Clq/MBL/SPA receptor C1qR(p) |
| | | mRNA |
| 170 | L78440 | Homo sapiens STAT4 mRNA |
| 171 | AL049309 | Homo sapiens mRNA; cDNA |
| | | DKFZp564B176 (from clone |
| | | DKFZp564B176) |
| 172 | X55988 | Human EDN mRNA for eosinophil |
| | | derived neurotoxin |
| 173 | AL008637 | Human DNA sequence from clone CTA- |
| | | 833B7 on chromosome 22q12.3-13.2 |
| | | Contains the NCF4 gene for cytosolic |
| | | neutrophil factor 4 (40 kD), the 5′ part of |
| | | the CSF2RB gene for granulocyte- |
| | | macrophage low-affinity colony |
| | | stimulating factor 2 receptor beta, ESTs, |
| | | STSs and GSSs |
| 174 | M82809 | Human annexin IV (ANX4) mRNA |
| 176 | U72882 | Human interferon-induced leucine zipper |
| | | protein (IFP35) mRNA |
| 177 | AF054825 | Homo sapiens VAMP5 mRNA |
| 178 | AF014398 | Homo sapiens myo-inositol |
| | | monophosphatase 2 mRNA |
| 179 | U26174 | Human pre-granzyme 3 mRNA |
| 181 | U49392 | Human allograft inflammatory factor-1 |
| | | (AIF-1) mRNA |
| 182 | D83174 | Human mRNA for collagen binding |
| | | protein 2 |
| 183 | L33075 | Homo sapiens ras GTPase-activating-like |
| | | protein (IQGAP1) mRNA |
| 184 | AB020630 | Homo sapiens mRNA for KIAA0823 |
| | | protein |
| 185 | AI018098 | |
| 186 | Z22971 | H.sapiens mRNA for M130 antigen |
| | | extracellular variant |
| 187 | U51333 | Human hexokinase III (HK3) mRNA |
| 188 | K00650 | Human fos proto-oncogene (c-fos) |
| 189 | U49187 | Human placenta (Diff48) mRNA |
| 190 | L23134 | Homo sapiens metase (MET-1) mRNA |
| 191 | X61118 | Human TTG-2 mRNA for a cysteine rich |
| | | protein with LIM motif |
| 192 | AB023211 | Homo sapiens mRNA for KIAA0994 |
| | | protein |
| 193 | AL031282 | Human DNA sequence from clone 283E3 |
| | | on chromosome 1p36.21-36.33. Contains |
| | | the alternatively spliced gene for Matrix |
| | | Metalloproteinase in the Female |
| | | Reproductive tract MIFR1, -2, |
| | | MMP21/22A, -B and -C, a novel gene, the |
| | | alternatively spliced CDC2L2 gene for |
| | | Cell Division Cycle 2-Like 2 (PITSLRE, |
| | | p58/GTA, Galactosyltransferase |
| | | Associated Protein Kinase) beta 1, beta 2- |
| | | 1, beta 2-2 and alpha 2-4, a 40S Ribosomal |
| | | Protein S7 pseudogene, part of the |
| | | KIAA0447 gene, a novel alternatively |
| | | spliced gene similar to many |
| | | (archae)bacterial, worm and yeast |
| | | hypothetical genes, and the GNB1 gene for |
| | | Guanine Nucleotide Binding Protein (G |
| | | protein), Beta polypeptide 1 (Transducin |
| | | Beta chain 1). Contains putative CpG |
| | | islands, ESTs, STSs and GSSs |
| 194 | X15376 | Human mRNA for GABA-A receptor, |
| | | gamma 2 subunit |
| 195 | AB007864 | Homo sapiens KIAA0404 mRNA |
| 196 | U12471 | Human thrombospondin-1 gene |
| 197 | S71043 | Ig alpha 2 mmunoglobulin A heavy chain |
| | | allotype 2 {constant region, germ line} |
| | | [human, peripheral blood neutrophils, |
| | | Genomic] |
| 198 | M14758 | Homo sapiens P-glycoprotein (PGY1) |
| | | mRNA |
| 199 | X84373 | H.sapiens mRNA for nuclear factor |
| | | RIP140 |
| 200 | M34423 | Human beta-galactosidase (GLB1) mRNA |
| 201 | AF087036 | Homo sapiens musculin mRNA |
| 202 | U95006 | Human D9 splice variant A mRNA |
| 203 | AA631972 | |
| 204 | Z24724 | H.sapiens polyA site DNA |
| 205 | AF055008 | Homo sapiens clone 24720 epithelin 1 and |
| | | 2 mRNA |
| 206 | D30783 | Homo sapiens mRNA for epiregulin |
| 208 | AI142565 | |
| 210 | M10098 | Human 18S rRNA gene |
| 211 | U82303 | Homo sapiens unknown protein mRNA |
| 212 | L25081 | Homo sapiens GTPase (rhoC) mRNA |
| 214 | M13755 | Human interferon-induced 17-kDa/15-kDa |
| | | protein mRNA |
| 216 | M13142 | Human factor XI (blood coagulation |
| | | factor) mRNA |
| 217 | AI687419 | |
| 219 | AI961743 | |
| 220 | X93086 | H.sapiens mRNA for biliverdin IX alpha |
| | | reductase |
| 221 | J04765 | Human osteopontin mRNA |
| 222 | L37792 | Homo sapiens syntaxin 1A mRNA |
| 223 | X91817 | H.sapiens mRNA for transketolase-like |
| | | protein |
| 224 | S81914 | IEX-1 = radiation-inducible immediate- |
| | | early gene [human, placenta, mRNA] |
| 225 | X02419 | H.sapiens uPA gene |
| 226 | X01630 | Human mRNA for argininosuccinate |
| | | synthetase |
| 227 | AJ001481 | Homo sapiens mRNA for DUX1 protein |
| 228 | U79725 | Human A33 antigen precursor mRNA |
| 229 | M14083 | Human beta-migrating plasminogen |
| | | activator inhibitor I mRNA |
| 230 | U03688 | Human dioxin-inducible cytochrome P450 |
| | | (CYP1B1) mRNA |
| 231 | U67963 | Human lysophospholipase homolog (HU |
| | | K5) mRNA |
| 232 | AJ223183 | Homo sapiens mRNA for DORA protein |
| 233 | AB018549 | Homo sapiens MD-2 mRNA |
| 234 | U07563 | Human ABL gene, exon 1b and intron 1b, |
| | | and putative M8604 Met protein (M8604 |
| | | Met) gene |
| 235 | AI961220 | |
| 236 | S82470 | BB1 malignant cell expression-enhanced |
| | | gene/tumor progression-enhanced gene |
| | | [human, UM-UC-9 bladder carcinoma cell |
| | | line, mRNA] |
| 237 | Y14737 | Homo sapiens mRNA for immunoglobulin |
| | | lambda heavy chain |
| 240 | Y09392 | H.sapiens mRNA for WSL-LR, WSL-S1 |
| | | and WSL-S2 proteins |
| 241 | AL031685 | Human DNA sequence from clone RP5- |
| | | 963K23 on chromosome 20q13.1 1-13.2 |
| | | Contains a KRT18 (Keratin type I, |
| | | Cytoskeletal 18 (Cytokeratin 18, |
| | | CK18,CYK18)) pseudogene, a gene for a |
| | | novel protein, the SPATA2 gene for |
| | | spermatogenesis associated protein 2 |
| | | (KIAA0757) and the 3′ end of the gene for |
| | | KIAA0939 (novel Sodium/hydrogen |
| | | exchanger family member). Contains |
| | | ESTs, STSs, GSSs and four putative CpG |
| | | islands |
| 242 | AL049963 | Homo sapiens mRNA; cDNA |
| | | DKFZp564A132 (from clone |
| | | DKFZp564A132) |
| 243 | AL022162 | Homo sapiens DNA sequence from PAC |
| | | 454M7 on chromosome Xq25-26.3. |
| | | Contains the OCRL1 gene for Lowe |
| | | Oculocerebrorenal Syndrome protein |
| | | OCRL-1. Contains ESTs, STSs and GSSs |
| 244 | AF022375 | Homo sapiens vascular endothelial growth |
| | | factor mRNA |
| 245 | U29943 | Human ELAV-like neuronal protein-2 |
| | | Hel-N2 mRNA |
| 246 | M64929 | Human protein phosphatase 2A alpha |
| | | subunit mRNA |
| 247 | AF001862 | Homo sapiens FYN binding protein |
| | | mRNA |
| 248 | X04371 | Human 1.6 Kb mRNA for 2-5A synthetase |
| | | induced by interferon |
| 249 | X04011 | Human mRNA of X-CGD gene involved |
| | | in chronic granulomatous disease located |
| | | on chromosome X |
| 250 | AB016789 | Homo sapiens mRNA for |
| | | Glutamine:fructose-6-phosphate |
| | | amidotransferase |
| 251 | AF002697 | Homo sapiens E1B 19K/Bc1-2-binding |
| | | protein Nip3 mRNA, nuclear gene |
| | | encoding mitochondrial protein |
| 252 | D21878 | Human mRNA for BST-1 |
| 253 | U50535 | Human BRCA2 region, mRNA sequence |
| | | CG006 |
| 254 | U20350 | Human C protein-coupled receptor V28 |
| | | mRNA |
| 255 | AF045800 | Homo sapiens gremlin mRNA |
| 256 | D89974 | Homo sapiens mRNA for |
| | | glycosylphosphatidyl inositol-anchored |
| | | protein GPI-80 |
| 257 | D31764 | Human mRNA for KIAA00064 gene |
| 258 | X54489 | Human gene for melanoma growth |
| | | stimulatory activity (MGSA) |
| 259 | AB014555 | Homo sapiens mRNA for KIAA0655 |
| | | protein |
| 260 | M33647 | Human retinoblastoma associated (RB1) |
| | mRNA | |
| 261 | D38552 | Human mRNA for KIAA0073 gene |
| 262 | X04106 | Human mRNA for calcium dependent |
| | | protease (small subunit) |
| 263 | U92818 | Homo sapiens c33.28 unnamed HERV-H |
| | | protein mRNA |
| 264 | AF010316 | Homo sapiens Pig12 (PIG12) mRNA |
| 265 | X54486 | Human gene for C1-inhibitor |
| 266 | D64142 | Human mRNA for histone H1x |
| 267 | M15330 | Human interleukin 1-beta (IL1B) mRNA |
| 268 | J02931 | Human placental tissue factor (two forms) |
| | | mRNA |
| 269 | U48807 | Human MAP kinase phosphatase (MKP-2) |
| | | mRNA |
| 270 | M27826 | Homo sapiens human endogeneous |
| | | retrovirus RTVL-H neutral protease large |
| | | subunit mRNA |
| 271 | AL049250 | Homo sapiens mRNA; cDNA |
| | | DKFZp564D113 (from clone |
| | | DKFZp564D113) |
| 272 | AB002308 | Homo sapiens mRNA for KIAA0310 |
| | | protein |
| 275 | AI817548 | |
| 276 | M28130 | Human interleukin 8 (IL8) gene |
| 278 | Z38026 | H.sapiens mRNA for FALL-39 peptide |
| | | antibiotic |
| 280 | D49357 | Human mRNA for S-adenosylmethionine |
| | | synthetase |
| 281 | J02871 | |
| | | Human lung cytochrome P450 (IV |
| | | subfamily) BI protein |
| 282 | M55405 | Homo sapiens mucin (MUC-3) mRNA |
| 283 | W27095 | |
| 284 | U64197 | Homo sapiens chemokine exodus-1 |
| | | mRNA |
| 285 | X52015 | H.sapiens mRNA for interleukin-1 |
| | | receptor antagonist |
| 286 | X95808 | H.sapiens mRNA for protein encoded by a |
| | | candidate gene, DXS6673E, for mental |
| | | retardation |
| 288 | AF027516 | Homo sapiens trans-golgi network |
| | | glycoprotein 51 (TGN) mRNA |

[0044] CI-779 activity genes represented by each qualifier in Table 2 can be identified based on the HG-U95Av2 gene chip annotation provided by Affymetrix. Genes thus identified are illustrated in Table 5. CCI-779 activity genes can also be determined based on the corresponding Entrez accession numbers. In addition, CCI-779 activity genes can be determined by BLAST searching the corresponding CPSs, or the unambiguous segments of the corresponding SEQ ID NOs, against a human genome sequence database. Suitable human genome sequence databases for this purpose include, but are not limited to, the NCBI human genome database. The NCBI also provides BLAST programs, such as “blastn,” for searching its sequence databases.

TABLE 5
CCI-779 Activity Genes

| | | |
|---|---|---|
| | | Sequences Useful For Making Probes/Primers |
| CPS | CCI-779 Activity Gene | for CCI-779 Activity Genes |

| | | |
|---|---|---|
| 1 | DKFZP564E1962 | SEQ ID NO: 1 |
| 2 | ETR101 | SEQ ID NO: 2 |
| 3 | PFN1 | SEQ ID NO: 3 |
| 4 | APOBECIL | SEQ ID NO: 4 |
| 5 | CKAP1 | SEQ ID NO: 5 |
| 6 | KIAA0220 | SEQ ID NO: 6 |
| 7 | CORO1A | SEQ ID NO: 7 |
| 8 | GNL1 | SEQ ID NO: 8 |
| 9 | AKR1A1 | SEQ ID NO: 9 |
| 10 | ID2 | SEQ ID NOS: 10, 289, and 353 |
| 11 | PSG7 | SEQ ID NO: 11 |
| 13 | IDH2 | SEQ ID NO: 12 |
| 14 | RER1 | SEQ ID NO: 13 |
| 15 | TUBB | SEQ ID NOS: 14 and 290 |
| 16 | HADH2 | SEQ ID NO: 15 |
| 17 | NDUFB5 | SEQ ID NO: 16 |
| 18 | APRT | SEQ ID NOS: 17 and 310 (Y00486) |
| 19 | PSME2 | SEQ ID NOS: 18 and 291 |
| 20 | MTCP1 | SEQ ID NOS: 19 and 311 (Z24459) |
| 21 | NDUFB3 | SEQ ID NOS: 20 and 312 (A203354) |
| 23 | CTSL | SEQ ID NO: 21 |
| 24 | FGL2 | SEQ ID NOS: 22 and 292 |
| 25 | DKFZP564C1940 | SEQ ID NO: 23 |
| 26 | 28SRNA5_Hs_AFFX | SEQ ID NO: 24 |
| 27 | SEMA3F | SEQ ID NO: 25 |
| 28 | BST2 | SEQ ID NO: 26 |
| 29 | UNK_AL050021 | SEQ ID NO: 27 |
| 30 | UBE2L6 | SEQ ID NO: 28 |
| 31 | SLC11A1 | SEQ ID NOS: 29 and 354 |
| 32 | CDKN1C | SEQ ID NOS: 30 and 313 (U22398) |
| 33 | GAIP | SEQ ID NO: 31 |
| 34 | TACC2 | SEQ ID NOS: 32 and 355 |
| 35 | CLNS1A | SEQ ID NO: 33 |
| 36 | DPYSL2 | SEQ ID NO: 34 |
| 37 | FCGR3A | SEQ ID NO: 35 |
| 38 | UQCRC1 | SEQ ID NO: 36 |
| 39 | GZMA | |
| 41 | PSMB10 | SEQ ID NOS: 38 and 314 (X71874) |
| 42 | IDS | SEQ ID NO: 39 |
| 43 | AHNAK | SEQ ID NOS: 40, 315 (M80899), and 356 |
| 44 | PTPN7 | SEQ ID NOS: 41 and 293 |
| 45 | DUSP2 | SEQ ID NO: 42 |
| 46 | PSMB9 | SEQ ID NO: 43 |
| 47 | UNK_AI652978 | SEQ ID NO:44 |
| 48 | UNK_AF025529 | SEQ ID NO: 45 |
| 49 | SDR1 | SEQ ID NO: 46 |
| 50 | POLR2L | SEQ ID NO: 47 |
| 51 | SCYA2 | SEQ ID NOS: 48 and 294 |
| 52 | PAI2 | SEQ ID NO: 49 |
| 53 | UNK_U66047 | SEQ ID NO: 50 |
| 54 | UNK_U00930 | SEQ ID NO: 51 |
| 55 | JMJ | SEQ ID NO: 52 |
| 56 | UGP2 | SEQ ID NOS: 53 and 357 |
| 57 | KIAA0410 | SEQ ID NO: 54 |
| 58 | NDUFS7 | SEQ ID NOS: 55 and 316 (AC005329) |
| 59 | KIAA0645 | SEQ ID NO: 56 |
| 60 | GSTP1 | SEQ ID NOS: 57, 295, and 317 (U12472) |
| 61 | DECR1 | SEQ ID NOS: 58 and 318 (U78302) |
| 62 | PLXNC1 | SEQ ID NOS: 59 and 319 (AF030339) |
| 63 | TUBA2 | SEQ ID NOS: 60 and 320 (AF005392) |
| 64 | NME1 | SEQ ID NO: 61 |
| 65 | UNK_AI679353 | SEQ ID NO: 62 |
| 66 | RNAHP | SEQ ID NOS: 63 and 321 (H68340) |
| 67 | ZNF198 | SEQ ID NO: 64 |
| 68 | PRCP | SEQ ID NO: 65 |
| 70 | DKFZP586A0522 | SEQ ID NO: 66 |
| 71 | SFRS11 | SEQ ID NO: 67 |
| 72 | RAC2 | SEQ ID NO: 68 |
| 73 | ZFP103 | SEQ ID NO: 69 |
| 74 | LOC51580 | SEQ ID NOS: 70 and 358 |
| 75 | NRD1 | SEQ ID NOS: 71 and 359 |
| 76 | UNK_AF070644 | SEQ ID NO: 72 |
| 77 | KIAA0906 | SEQ ID NO: 73 |
| 78 | MT1F | SEQ ID NOS: 74 and 322 (M10943) |
| 79 | P85SPR | SEQ ID NO: 75 |
| 80 | UNK_N53547 | SEQ ID NO: 76 |
| 81 | GPRK5 | SEQ ID NOS: 77 and 296 |
| 83 | SCYA7 | SEQ ID NO: 78 |
| 84 | TUBA3 | SEQ ID NO: 79 |
| 85 | SCML2 | SEQ ID NO: 80 |
| 87 | IL1R1 | SEQ ID NO: 81 |
| 88 | UNK_AL008729 | SEQ ID NO: 82 |
| 89 | KIAA0191 | SE ID NO: 83 |
| 90 | EGFL5 | SEQ ID NO: 84 |
| 91 | DUSP1 | SEQ ID NO: 85 |
| 92 | FBP1 | SEQ ID NOS: 86 and 323 (U21931) |
| 93 | HRB | SEQ ID NOS: 87 and 324 (L42025) |
| 94 | NAGA | SEQ ID NO: 88 |
| 95 | GLRX | SE ID NO: 89 |
| 96 | UNK_W28281 | SEQ ID NOS: 90 and 360 |
| 97 | UNK_AL096740 | SEQ ID NOS: 91, 325 (AL096740), and 361 |
| 98 | TBXAS1 | SEQ ID NOS: 92, 326 (D34625), 362, and 363 |
| 99 | DPYD | |
| 100 | ECGF1 | SEQ ID NOS: 94 and 297 |
| 101 | TIMP1 | SEQ ID NOS: 95 and 327 (D11139) |
| 102 | GSN | SEQ ID NO: 96 |
| 103 | SECTM1 | SEQ ID NO: 97 |
| 104 | OLR1 | SEQ ID NOS: 98 and 328 (AF079167) |
| 105 | D6S49E | SEQ ID NOS: 99 and 364 |
| 106 | JUNB | SEQ ID NO: 100 |
| 107 | PFC | SEQ ID NOS: 101 and 329 (AF005664) |
| 108 | POLR2E | SEQ ID NO: 102 |
| 109 | THBS1 | SEQ ID NO: 103 |
| 110 | HK2 | SEQ ID NOS: 104 and 330 (Z46376) |
| 111 | INSIG1 | SEQ ID NOS: 105, 331 (U96876), 365, and 366 |
| 112 | HCK | SEQ ID NOS: 106 and 298 |
| 113 | HP10390 | SEQ ID NO: 107 |
| 114 | UNK_U51712 | SEQ ID NO: 108 |
| 115 | KIAA0217 | SEQ ID NO: 109 |
| 116 | NCF1 | SEQ ID NO: 110 |
| 117 | KIAA1113 | SEQ ID NOS: 111 and 367 |
| 118 | DKFZP566H073 | SEQ ID NO: 112 |
| 119 | ATP2B1 | SEQ ID NOS: 113 and 368 |
| 120 | IFITM2 | SEQ ID NO: 114 |
| 121 | MNDA | SEQ ID NO: 115 |
| 122 | BTN3A2 | SEQ ID NO: 116 |
| 123 | KIAA0776 | SEQ ID NO: 117 |
| 124 | D6S2245E | SEQ ID NO: 118 |
| 125 | KIAA0628 | SEQ ID NO: 119 |
| 126 | SELL | SEQ ID NO: 120 |
| 127 | MPV17 | SEQ ID NO: 121 |
| 128 | FABP5 | SEQ ID NOS: 122 and 332 (M94856) |
| 129 | CASP1 | SEQ ID NOS: 123 and 299 |
| 130 | PTPN6 | SEQ ID NO: 124 |
| 131 | SKAP-HOM | SEQ ID NO: 125 |
| 133 | GRO2 | SEQ ID NO: 126 |
| 134 | RRAS | SEQ ID NO: 127 |
| 135 | KIAA0022 | SEQ ID NOS: 128 and 369 |
| 136 | FLII | SEQ ID NOS: 129 and 333 (U80184) |
| 137 | PRF1 | SEQ ID NOS: 130 and 334 (M28393) |
| 138 | KIAA0102 | SEQ ID NO: 131 |
| 139 | UNK_AA176780 | SEQ ID NO: 132 |
| 140 | PYGL | SEQ ID NOS: 133 and 335 (AF046798) |
| 141 | DBP | SEQ ID NO: 134 |
| 143 | RANBP2L1 | SEQ ID NO: 135 |
| 144 | TNFSF10 | SEQ ID NO: 136 |
| 145 | KIAA0854 | SEQ ID NO: 137 |
| 146 | SDS | SEQ ID NOS: 138 and 370 |
| 147 | KIAA0576 | SEQ ID NO: 139 |
| 148 | FCGR3B | SEQ ID NO: 140 |
| 149 | FCER1A | SEQ ID NO: 141 |
| 150 | CD44 | SEQ ID NOS: 142 and 336 (L05424) |
| 151 | ID1 | SEQ ID NOS: 143 and 300 |
| 152 | UNK_AI760801 | SEQ ID NO: 144 |
| 153 | ADTB2 | SEQ ID NO: 145 |
| 154 | MADH3 | SEQ ID NOS: 146 and 301 |
| 155 | ARPC1B | SEQ ID NO: 147 |
| 156 | TALDO1 | SEQ ID NOS: 148, 337 (AF010400), and 371 |
| 157 | UNK_AL035079 | SEQ ID NO: 149 |
| 158 | STXBP1 | SEQ ID NO: 150 |
| 159 | UNG2 | SEQ ID NO: 151 |
| 160 | DUSP5 | SEQ ID NO: 152 |
| 161 | PTPRO | SEQ ID NO: 153 |
| 162 | SLA | SEQ ID NOS: 154 and 302 |
| 163 | RFP2 | SEQ ID NO: 155 |
| 164 | ADFP | SEQ ID NOS: 156 and 372 |
| 165 | ADTD | SEQ ID NOS: 157 and 373 |
| 166 | ADTG | SEQ ID NO: 158 |
| 168 | UNK_X87344 | SEQ ID NOS: 159 and 338 (X87344) |
| 170 | CAPG | SEQ ID NO: 160 |
| 171 | ARL7 | SEQ ID NO: 161 |
| 172 | RCV1 | SEQ ID NO: 162 |
| 173 | GRO3 | SEQ ID NO: 163 |
| 175 | UNK_AF070606 | SEQ ID NO: 164 |
| 176 | AOAH | SEQ ID NO: 165 |
| 177 | UNK_AJ224442 | SEQ ID NO: 166 |
| 178 | MSR1 | SEQ ID NO: 167 |
| 179 | XAP4 | SEQ ID NO: 168 |
| 180 | C1QR | SEQ ID NO: 169 |
| 181 | STAT4 | SEQ ID NO: 170 |
| 182 | UNK_AL049309 | SEQ ID NO: 171 |
| 183 | RNASE2 | SEQ ID NO: 172 |
| 184 | NCF4 | SEQ ID NOS: 173 and 303 |
| 185 | ANXA4 | SE ID NO: 174 |
| 186 | ME2 | SEQ ID NOS: 175 and 339 (M55905) |
| 187 | IFI35 | SEQ ID NO: 176 |
| 188 | VAMP5 | SEQ ID NO: 177 |
| 189 | IMPA2 | SEQ ID NO: 178 |
| 190 | GZMK | SEQ ID NO: 179 |
| 191 | BGN | SEQ ID NOS: 180 and 340 (J04599) |
| 192 | AIF1 | SEQ ID NO: 181 |
| 193 | CBP2 | SEQ ID NO: 182 |
| 195 | IQGAP1 | SEQ ID NO: 183 |
| 196 | KIAA0823 | SEQ ID NO: 184 |
| 197 | UNK_AI018098 | SEQ ID NOS: 185 and 374 |
| 198 | CD163 | SEQ ID NO: 186 |
| 199 | HK3 | SEQ ID NO: 187 |
| 200 | FOS | SEQ ID NO: 188 |
| 201 | DIFF48 | SEQ ID NO: 189 |
| 202 | UNK_L23134 | SEQ ID NO: 190 |
| 203 | LMO2 | SEQ ID NO: 191 |
| 204 | PDI2 | SEQ ID NO: 192 |
| 205 | UNK_AL031282 | SEQ ID NO: 193 |
| 206 | GABRG2 | SEQ ID NO: 194 |
| 207 | KIAA0404 | SEQ ID NO: 195 |
| 208 | UNK_U12471 | SEQ ID NO: 196 |
| 209 | IGHA1 | SEQ ID NOS: 197, 304, and 305 |
| 210 | ABCB1 | SEQ ID NO: 198 |
| 211 | NRIP1 | SEQ ID NO: 199 |
| 213 | GLB1 | SEQ ID NO: 200 |
| 214 | MSC | SEQ ID NO: 201 |
| 216 | UNK_U95006 | SEQ ID NO: 202 |
| 217 | NK4 | SEQ ID NO: 203 |
| 218 | UNK_Z24724 | SEQ ID NO: 204 |
| 219 | GRN | SEQ ID NO: 205 |
| 220 | EREG | SEQ ID NO: 206 |
| 221 | KIAA0382 | SEQ ID NOS: 207 and 341 (AB002380) |
| 222 | RNASE6 | SEQ ID NO: 208 |
| 223 | KIAA0442 | SEQ ID NOS: 209, 342 (AB007902), and 375 |
| 225 | 18SRNA3_Hs_AFFX | SEQ ID NO: 210 |
| 226 | UNK_U82303 | SEQ ID NO: 211 |
| 227 | ARHC | SEQ ID NO: 212 |
| 228 | CREM | SEQ ID NOS: 213, 306, and 343 (S68134) |
| 229 | ISG15 | SEQ ID NO: 214 |
| 230 | CCR7 | SEQ ID NOS: 215 and 344 (L31584) |
| 231 | F11 | SEQ ID NOS: 216 and 376 |
| 232 | UNK_AI687419 | SEQ ID NO: 217 |
| 233 | UNK_AC002073 | SEQ ID NOS: 218, 345 (AC002073), and 377 |
| 234 | STK17A | SEQ ID NO: 219 |
| 235 | BLVRA | SEQ ID NO: 220 |
| 236 | SPP1 | SEQ ID NOS: 221 and 307 |
| 237 | STX1A | SEQ ID NO: 222 |
| 238 | TKTL1 | SEQ ID NO: 223 |
| 239 | IER3 | SEQ ID NO: 224 |
| 241 | PLAU | SEQ ID NO: 225 |
| 242 | ASS | SEQ ID NO: 226 |
| 244 | DUX1 | SEQ ID NO: 227 |
| 245 | GPA33 | SEQ ID NO: 228 |
| 246 | PAI1 | SEQ ID NO: 229 |
| 247 | CYP1B1 | SEQ ID NOS: 230 and 308 |
| 249 | HU-K5 | SEQ ID NOS: 231 and 378 |
| 250 | DORA | SEQ ID NO: 232 |
| 253 | MD-2 | SEQ ID NO: 233 |
| 254 | UNK_U07563 | SEQ ID NO: 234 |
| 255 | SPINK1 | SEQ ID NO: 235 |
| 256 | UNK_S82470 | SEQ ID NO: 236 |
| 257 | IGHG3 | SEQ ID NO: 237 |
| 258 | UNK_AA151971 | SEQ ID NOS: 238, 309, 346 (AA151971), and 379 |
| 259 | UNK_AA216639 | SEQ ID NOS: 239 and 347 (AA216639) |
| 260 | TNFRSF12 | SEQ ID NO: 240 |
| 261 | UNK_AL031685 | SEQ ID NO: 241 |
| 262 | UNK_AL049963 | SEQ ID NO: 242 |
| 263 | APELIN | SEQ ID NO: 243 |
| 264 | VEGF | SEQ ID NO: 244 |
| 265 | ELAVL2 | SEQ ID NO: 245 |
| 266 | PPP2R2A | SEQ ID NO: 246 |
| 267 | UNK_AF001862 | SEQ ID NOS: 247 and 380 |
| 268 | OAS1 | SEQ ID NO: 248 |
| 269 | CYBB | SEQ ID NO: 249 |
| 270 | GFPT2 | SEQ ID NO: 250 |
| 271 | BNIP3 | SEQ ID NO: 251 |
| 272 | BST1 | SEQ ID NO: 252 |
| 273 | UNK_U50535 | SEQ ID NO: 253 |
| 274 | CX3CR1 | SEQ ID NO: 254 |
| 275 | CKTSF1B1 | SEQ ID NO: 255 |
| 276 | VNN2 | SEQ ID NO: 256 |
| 277 | KIAA0064 | SEQ ID NOS: 257 and 381 |
| 278 | GRO1 | SEQ ID NO: 258 |
| 279 | KIAA0655 | SEQ ID NO: 259 |
| 280 | RB1 | SEQ ID NO: 260 |
| 281 | KIAA0073 | SEQ ID NO: 261 |
| 282 | CAPN4 | SEQ ID NO: 262 |
| 283 | UNK_U92818 | SEQ ID NO: 263 |
| 284 | MGST1L1 | SEQ ID NO:264 |
| 285 | C1NH | SEQ ID NO: 265 |
| 286 | H1FX | SEQ ID NO: 266 |
| 287 | IL1B | SEQ ID NO 267 |
| 288 | F3 | SEQ ID NO: 268 |
| 289 | DUSP4 | SEQ ID NO: 269 |
| 290 | HUMRTVLH3 | SEQ ID NO: 270 |
| 291 | UNK_AL049250 | SEQ ID NO: 271 |
| 292 | UNK_AB002308 | SEQ ID NO: 272 |
| 293 | EDN1 | SEQ ID NOS: 273 and 348 (J05008) |
| 295 | FRAT2 | SEQ ID NOS: 274 and 349 (AF062739) |
| 296 | UNK_AI817548 | SEQ ID NOS: 275 and 382 |
| 297 | IL8 | SEQ ID NO: 276 |
| 298 | FSCN2 | SEQ ID NOS: 277, 350 (AI189621), and 383 |
| 300 | CAMP | SEQ ID NO: 278 |
| 301 | FCGR1A | SEQ ID NOS: 279 and 351 (M63835) |
| 302 | MAT1A | SEQ ID NOS: 280 and 384 |
| 303 | CYP4B1 | SEQ ID NO: 281 |
| 304 | MUC3 | SEQ ID NO: 282 |
| 305 | B7 | SEQ ID NO: 283 |
| 306 | SCYA20 | SEQ ID NO: 284 |
| 307 | IL1RN | SEQ ID NO: 285 |
| 308 | ZNF261 | SEQ ID NO: 286 |
| 309 | LGALS2 | SEQ ID NOS: 287, 352 (AL022315), and 385 |
| 310 | TGN51 | SEQ ID NOS: 288 and 386 |

[0045] In one embodiment, the BLAST search of the NCBI human genome database is conducted by using CPSs. Gene(s) that aligns to a given CPS with at least 95% sequence identity can be identified. In many cases, the identified gene(s) has at least 96%, 97%, 98%, 99%, or more sequence identity with the CPS. The results of the BLAST search are detailed below.

[0046] CPS 1 corresponds to DKFZP564E1962 (TXNDC) which encodes thioredoxin domain-containing. This gene has LocusID: 81542, and is located on chromosome 14 with reported cytogenetic location 14q21.3. The gene resides in genomic locus NT_{—}025892 (NCBI Genome Annotation). The gene product is a member of the thioredoxin family.

[0047] CPS 1 also has 86-90% sequence identity with an intron sequence of GK003 which encodes GK003 protein. GK003 has LocusID: 57002, and is located on chromosome 7 with reported cytogenetic location 7p15.2. In addition, fragments of CPS 1 align with a chromosomal region on chromosome 13 and an intron sequence of OATPRP4 with 87-95% sequence identity. The chromosomal region on chromosome 13 is located near ING1 which encodes inhibitor of growth family, member 1, and has LocusID: 3621. OATPRP4 encodes organic anion transporter polypeptide-related protein 4, and has LocusID: 81796 with reported cytogenetic location 8q13.1.

[0048] CPS 2 corresponds to ETR101 which encodes immediate early protein. This gene has LocusID: 9592, and is located on chromosome 19 with reported cytogenetic location 19 p13.13. The gene resides in genomic locus NT_{—}031915 (NCBI Genome Annotation). Expression of immediate early protein can be induced by TPA stimulation in promyelocytic leukemia cell line HL-60 and in other leukemia cell lines.

[0049] A fragment of CPS 2 (nucleotides 309 to 492 of CPS 2) shows 98% sequence identity with an intron sequence of LOC169782. LOC169782 encodes a protein similar to transcription factor IIIA (Factor A) (TFIIIA), and has reported cytogenetic location 9p24.1.

[0050] CPS 3 corresponds to PFN1 which encodes profilin 1. This gene has LocusID: 5216, and is located on chromosome 17 with reported cytogenetic location 17 p13.3. The gene resides in genomic locus NT_{—}033299 (NCBI Genome Annotation). Profilin 1 is a ubiquitous actin monomer-binding protein belonging to the profilin family. It is thought to regulate actin polymerization in response to extracellular signals. Deletion of PFN 1 gene is associated with Miller-Dieker syndrome.

[0051] Nucleotides 7 to 406 of CPS 3 align with various regions in the human genome with 86-93% sequence identity. These regions include LOC163511, COAS3, a region near LOC149010, a region near LOC200030, an intron sequence of DKFZp434D177, FLJ20719, LOC199970, and LOC206456. LOC163511 encodes a protein similar to profilin I, and has reported cytogenetic location 1q23.2. COAS3 encodes chromosome 1 amplified sequence 3, and has LocusID: 200025 with reported cytogenetic location 1q12. LOC149010 encodes a protein similar to hypothetical protein DKFZp434D177, and has reported cytogenetic location 1q12. LOC200030 encodes a protein similar to hypothetical protein DJ328E19.C1.1, and has reported cytogenetic location 1q12. DKFZp434D177 encodes hypothetical protein DKFZp434D177, and has LocusID: 84224 with reported cytogenetic location 1p36.12. FLJ20719 encodes hypothetical protein FLJ20719, and has LocusID: 55672 with reported cytogenetic location 1p31. LOC199970 has reported cytogenetic location 1p11.1. LOC206456 encodes a protein similar to chain P, structure of bovine beta-actin-profilin complex with actin bound Atp phosphates solvent accessible. LOC206456 is located on chromosome 6.

[0052] CPS 4 corresponds to APOBEC 1L (APOBEC3C) which encodes a protein similar to APOBECI protein. APOBECIL gene has LocusID: 27350, and is located on chromosome 22 with reported cytogenetic location 22q13.1-q13.2. APOBECIL gene product is similar to phorbolin (DJ742C19.2), and may catalyze hydrolytic deamination of cytidine nucleotides. The gene product contains a cytidine deaminase zinc-binding domain.

[0053] CPS 4 also has 91% sequence identity with LOC200316 which encodes a protein similar to phorbolin 3 (APOBECI-like). LOC200316 has LocusID: 200316 with reported cytogenetic location 22q13.1. In addition, CPS 4 aligns with two other regions on chromosome 22 with 89-92% sequence identity.

[0054] CPS 5 corresponds to CKAP1 which encodes cytoskeleton-associated protein 1. This gene has LocusID: 1155, and is located on chromosome 19 with reported cytogenetic location 19q13.11-q13.12. The gene resides in genomic locus NT_{—}011296 (NCBI Genome Annotation). Cytoskeleton-associated protein 1 associates with microtubules. It contains a glycine domain which plays a role in association with microtubules.

[0055] Affymetrix annotation suggests that CPS 6 corresponds to KIAA0220 which has LocusID: 23117 and is located at chromosome 16 p12.1. Blast search of the Entrez human genome sequence database shows that CPS 6 has 99% sequence identity to a region on chromosome 16. This region is near LOC255565, and resides in genomic locus NT_{—}035368 (NCBI Genome Annotation).

[0056] In addition, fragments of CPS 6 align with various chromosomal regions with at least 90% sequence identity. These regions include LOC220555, LOC124302, a chromosomal region near LOC220567, a chromosomal region near LOC254081, and a chromosomal region near LOC197363. LOC220555 encodes a protein similar to nuclear pore complex interacting protein, and has reported cytogenetic location 16p 11.2. LOC124302 encodes a protein similar to nuclear pore complex interacting protein, and has reported cytogenetic location 18 p11.1. LOC220567 encodes a protein similar to apolipoprotein B48 receptor, and is located at chromosome 16q13. LOC254081 encodes a protein similar to group X secretory phospholipase A2 precursor (phosphatidylcholine 2-acylhydrolase GX) (GX sPLA2) (sPLA2-X), and is located on chromosome 16. LOC197363 encodes a protein similar to ataxin 2 related protein (isoform 1), and is located on chromosome 16.

[0057] CPS 7 corresponds to CORO1A which encodes coronin, actin binding protein, 1A. This gene has LocusID: 11151, and is located on chromosome 16 with reported cytogenetic location 16q13. The gene resides in genomic locus NT_{—}033291 (NCBI Genome Annotation). The gene product (coronin 1A) binds to actin, and may be involved in mitosis, cell motility, formation of phagocytic vacuoles and phagocytosis. Coronin 1A has at least five WD domains.

[0058] CPS 8 corresponds to GNL1 which encodes guanine nucleotide binding protein-like 1. This gene has LocusID: 2794, and is located on chromosome 6 with reported cytogenetic location 6p21.3. The gene resides in genomic locus NT_{—}007592 (NCBI Genome Annotation). The GNL1 gene, identified in the human major histocompatibility complex class I region, shows a high degree of similarity with its mouse counterpart. The GNL1 gene is located less than 2 kb centromeric to HLA-E, in the same transcriptional orientation. GNL1 is telomeric to HLA-B and HLA-C.

[0059] CPS 9 corresponds to AKR1A1 which encodes aldo-keto reductase family 1, member Al (aldehyde reductase). This gene has LocusID: 10327, and is located on chromosome 1 with reported cytogenetic location 1p33-p32. The gene resides in genomic locus NT_{—}032972 (NCBI Genome Annotation). Aldehyde reductase (aldo-keto reductase family 1, member A1) reduces carbonyl-containing substrates, and may metabolize xenobiotics. It is a NADPH-dependent member of the aldo-keto reductase superfamily.

[0060] CPS 10 corresponds to ID2 which encodes inhibitor of DNA binding 2, dominant negative helix-loop-helix protein. This gene has LocusID: 3398, and is located on chromosome 2 with reported cytogenetic location 2p25. The gene resides in genomic locus NT_{—}005334 (NCBI Genome Annotation). The gene product is a member of the Id helix-loop-helix family of proteins, and may negatively regulate cell differentiation.

[0061] CPS 10 also has 95% sequence identity with an intron sequence of PTPRG. PTPRG encodes protein tyrosine phosphatase, receptor type, G, and has LocusID: 5793 with reported cytogenetic location 3p21-p14. The protein encoded by PTPRG gene is a member of the protein tyrosine phosphatase (PTP) family. PTPs are known to be signaling molecules that regulate a variety of cellular processes including cell growth, differentiation, mitotic cycle, and oncogenic transformation. The PTP encoded by PTPRG gene possesses an extracellular region, a single transmembrane region, and two tandem intracytoplasmic catalytic domains, and thus represents a receptor-type PTP. The extracellular region of this PTP contains a carbonic anhydrase-like (CAH) domain, which is also found in the extracellular region of PTPRBETA/ZETA. PTPRG gene is located in a chromosomal region that is frequently deleted in renal cell carcinoma and lung carcinoma, and thus is thought to be a candidate tumor suppressor gene.

[0062] In addition, CPS 10 aligns with a chromosomal region near LOC140282 with 88% sequence identity. LOC140282 encodes a protein similar to translationally controlled tumor protein (TCTP) (p23) (Histamine-releasing factor) (HRF), and has reported cytogenetic location 21 q21.3.

[0063] Affymetrix annotation suggests that CPS 11 corresponds to PSG7 which encodes pregnancy specific beta-1-glycoprotein 7 and has LocusID: 5676. PSG7 is located at chromosome 19q13.2.

[0064] Blast search of the Entrez human genome sequence database shows that CPS 11 aligns with a region 3′ to PSG1 with at least 98% sequence identity. PSG1 encodes pregnancy specific beta-1-glycoprotein, and has LocusID: 5669 with reported cytogenetic location 19q13.2. The gene product is a member of the pregnancy-specific glycoprotein (PSG) and CEA families.

[0065] Moreover, CPS 11 has 92-95% sequence identity with various regions on chromosome 19. They include PSG2, PSG9, a region near PSG3, and a region near PSG7. PSG2 encodes pregnancy specific beta-1-glycoprotein 2, and has LocusID: 5670 with reported cytogenetic location 19q13.1-q13.2. PSG9 encodes pregnancy specific beta-1-glycoprotein 9, and has LocusID: 5678 with reported cytogenetic location 19q13.2. PSG3 encodes pregnancy specific beta-1-glycoprotein 3, and has LocusID: 5671 with reported cytogenetic location 19q13.2. PSG7 encodes pregnancy specific beta-1-glycoprotein 7, and has LocusID: 5676 with reported cytogenetic location 19q13.2.

[0066] CPS 13 corresponds to IDH2 which encodes isocitrate dehydrogenase 2 (NADP+), mitochondrial. This gene has LocusID: 3418, and is located on chromosome 15 with reported cytogenetic location 15q26.1. The gene resides in genomic locus NT_{—}033276 (NCBI Genome Annotation). Mitochondrial NADP(+)-specific isocitrate dehydrogenase 2 can decarboxylate isocitrate into alpha-ketoglutarate.

[0067] CPS 14 corresponds to RER1 which encodes a protein similar to S. cerevisiae RER1. This gene has LocusID: 11079, and is located on chromosome 1 with reported cytogenetic location 1pter-q24. The gene resides in genomic locus NT_{—}004350 (NCBI Genome Annotation).

[0068] CPS 15 corresponds to TUBB which encodes tubulin, beta polypeptide. This gene has LocusID: 7280, and is located on chromosome 6 with reported cytogenetic location 6p21.3. The gene resides in genomic locus NT_{—}034880 (NCBI Genome Annotation). Beta-tubulin polymerizes to form microtubules, and is a member of a family of structural proteins.

[0069] CPS 16 corresponds to HADH2 which encodes hydroxyacyl-Coenzyme A dehydrogenase, type II. This gene has LocusID: 3028, and is located on chromosome X with reported cytogenetic location Xp 11.2. The gene resides in genomic locus NT_{—}011799 (NCBI Genome Annotation). The gene product can bind to amyloid-beta peptide.

[0070] CPS 17 corresponds to NDUFB5 which encodes NADH dehydrogenase (ubiquinone) 1 beta subcomplex, 5 (16 kD, SGDH). This gene has LocusID: 4711, and is located on chromosome 3 with reported cytogenetic location 3q27.1. The gene resides in genomic locus NT_{—}022396 (NCBI Genome Annotation). The gene product is a subunit of NADH-ubiquinone oxidoreductase (complex I). It can transport electrons from NADH to ubiquinone.

[0071] CPS 17 also shows 77% sequence identity with a chromosomal region near LOC205833. LOC205833 has reported cytogenetic location 4q34.3.

[0072] CPS 18 corresponds to APRT which encodes adenine phosphoribosyltransferase. This gene has LocusID: 353, and is located on chromosome 16 with reported cytogenetic location 16q24. The gene resides in genomic locus NT_{—}010404 (NCBI Genome Annotation). Adenine phosphoribosyltransferase belongs to the purine/pyrimidine phosphoribosyltransferase family. This enzyme catalyzes the formation of AMP and inorganic pyrophosphate from adenine and 5-phosphoribosyl-1-pyrophosphate (PRPP). It can also produce adenine as a by-product of the polyamine biosynthesis pathway. A homozygous deficiency in this enzyme may cause 2,8-dihydroxyadenine urolithiasis.

[0073] CPS 19 corresponds to PSME2 which encodes proteasome (prosome, macropain) activator subunit 2 (PA28 beta). This gene has LocusID: 5721, and is located on chromosome 14 with reported cytogenetic location 14q11.2. The gene resides in genomic locus NT_{—}025892 (NCBI Genome Annotation).

[0074] CPS 19 also aligns with LOC220462 with 97% sequence identity. LOC220462 encodes a protein similar to proteasome activator complex subunit 2 (Proteasome activator 28-beta subunit) (PA28beta) (PA28b) (Activator of multicatalytic protease subunit 2) (11S regulator complex beta subunit) (REG-beta). LOC220462 has reported cytogenetic location 13q14.11. In addition, CPS 19 has about 90-96% sequence identity with LOC257093, LOC 166868, and an intron sequence of LOC152940. LOC257093 encodes a protein similar to proteasome activator complex subunit 2 (Proteasome activator 28-beta subunit), and is located on chromosome 5. LOC 166868 encodes a protein similar to PA28beta, and has reported cytogenetic location 4 p14. LOC152940 has reported cytogenetic location 4q31.3-q32.1. Furthermore, fragments of CPS 17 show 86-97% sequence identity with LOC220220 and LOC206704. LOC220220 encodes a protein similar to PA28beta, and has reported cytogenetic location 10p11.23. LOC206704 also encodes a protein similar to PA28beta, and is located on chromosome 8p21.1.

[0075] CPS 20 corresponds to MTCP1 which encodes mature T-cell proliferation 1. This gene has LocusID: 4515, and is located on chromosome X with reported cytogenetic location Xq28. The gene resides in genomic locus NT_{—}025965 (NCBI Genome Annotation). The gene product may be involved in the leukemogenic process of mature T cell proliferation.

[0076] CPS 21 corresponds to NDUFB3 which encodes NADH dehydrogenase (ubiquinone) 1 beta subcomplex, 3 (12 kD, B12). This gene has LocusID: 4709, and is located on chromosome 2 with reported cytogenetic location 2q31.3. The gene resides in genomic locus NT_{—}005370 (NCBI Genome Annotation). The multisubunit NADH:ubiquinone oxidoreductase (complex I) is an enzyme complex in the electron transport chain of mitochondria. NDUFB3 gene product is a subunit of NADH-ubiquinone oxidoreductase (complex I), and can transport electrons from NADH to ubiquinone.

[0077] CPS 21 also has about 96% sequence identity with NDUFB3P4. NDUFB3P4 encodes NADH dehydrogenase (ubiquinone) 1 beta subcomplex, 3 (12 kD, B12) pseudogene 4. It has LocusID: 93995, and is located on chromosome 14. The gene is located in an intron of WARS which encodes tryptophanyl-tRNA synthetase and has LocusID: 7453 with reported cytogenetic location 14q32.31.

[0078] Moreover, CPS 21 has about 86-91% sequence identity with NDUFB3P3, and intron sequence of KIAA0893, and an intron sequence of PPP6C. NDUFB3P3 encodes NADH dehydrogenase (ubiquinone) 1 beta subcomplex, 3 (12 kD, B12) pseudogene 3. It has LocusID: 93996, and is located on chromosome 14. KIAA0893 encodes KIAA0893 protein, and has LocusID: 22911 with reported cytogenetic location 1p13.2. PPP6C encodes protein phosphatase 6, catalytic subunit, and has LocusID: 5537 with reported cytogenetic location 9q34.11.

[0079] CPS 23 corresponds to CTSL which encodes cathepsin L. This gene has LocusID: 1514, and is located on chromosome 9 with reported cytogenetic location 9q21-q22. The gene resides in genomic locus NT_{—}023935 (NCBI Genome Annotation). The protein encoded by CTSL gene is a lysosomal cysteine proteinase that plays a role in intracellular protein catabolism. Its substrates include collagen and elastin, as well as alpha-1 protease inhibitor, a major controlling element of neutrophil elastase activity. The encoded protein has been implicated in several pathologic processes, including myofibril necrosis in myopathies and in myocardial ischemia, and in the renal tubular response to proteinuria. This protein is a member of the peptidase C1 family. At least two transcript variants encoding the same protein have been found for CTSL gene.

[0080] Fragments of CPS 23 have 84-88% sequence identity with LOC118945, LOC119215, and LOC219343. LOC118945, LOC119215, and LOC219343 encode proteins similar to cathepsin L precursor (Major excreted protein) (MEP), and are located at chromosome 10q23.32, 10q21.1 and 10q23.2, respectively.

[0081] Affymetrix annotation suggests that CPS 24 corresponds to FGL2 which encodes fibrinogen-like 2 and has LocusID: 10875. FGL2 has the reported cytogenetic location at chromosome 7q11.23.

[0082] Blast search of the Entrez human genome database shows that CPS 24 aligns with the non-protein-coding strand of KIAA1505 with at least 98% sequence identity. KIAA1505 encodes KIAA1505 protein, and has LocusID: 57639 with reported cytogenetic location 7 p12.3. KIAA1505 resides in genomic locus NT_{—}007933 (NCBI Genome Annotation).

[0083] Affymetrix annotation suggests that CPS 25 corresponds to DKFZP564C1940 which is also known as LRP10. LRP10 encodes low density lipoprotein receptor-related protein 10, and has LocusID: 26020. LRP10 is located at chromosome 14q11.1.

[0084] Blast search of the Entrez human genome sequence database shows that fragments of CPS 26 have 84-98% sequence identity with various regions on chromosomes 1, 2, 4, 5, 7, 9, 10, 11, 12, 17, 18, X, or Y. For instance, nucleotides 164-283 and 359-589 have 95% sequence identity with an intron sequence of LOC121292. LOC121292 is located at chromosome 12q24.31, and resides in genomic locus NT_{—}035241 (NCBI Genome Annotation). Nucleotides 253-323 and 359-589 of CPS 26 align with a region near LOC138924 with at least 95% sequence identity. LOC138924 encodes a protein similar to peptidyl-Pro cis trans isomerase, and is located at chromosome 9q21.31 and in genomic locus NT_{—}008580 (NCBI Genome Annotation). Nucleotides 374-588 of CPS 26 have 93% sequence identity with a region between DIM1 and FLJ21172. DIMI encodes a protein similar to S. pombe dim1+, and has LocusID: 10907 with reported cytogenetic location 18q23. FLJ21172 encodes hypothetical protein FLJ21172, and has LocusID: 79863 with reported cytogenetic location 18q23. Nucleotides 634-1116 of CPS 26 have 86% sequence identity with an intron sequence of MYO1D. MYO1D encodes myosin ID, and has LocusID: 4642 and reported cytogenetic location 17q11-q12.

[0085] CPS 27 corresponds to SEMA3F which encodes sema domain, immunoglobulin domain (Ig), short basic domain, secreted, (semaphorin) 3F. This gene has LocusID: 6405, and is located on chromosome 3 with reported cytogenetic location 3p21.3. The gene resides in genomic locus NT_{—}006014 (NCBI Genome Annotation). The semaphorins are a family of proteins that are involved in signaling. A typical family member has a secretion signal, a 500-amino acid sema domain, and 16 conserved cysteine residues. Sequence comparisons have grouped the secreted semaphorins into 3 general classes. Members of the semaphorin III family, including human semaphorin III, chicken collapsin, and mouse semaphorins A, D, and E, have a basic domain at the C terminus. SEMA3F gene product is a secreted member of the semaphorin III family.

[0086] CPS 28 corresponds to BST2 which encodes bone marrow stromal cell antigen 2. This gene has LocusID: 684, and is located on chromosome 19 with reported cytogenetic location 19 p13.2. The gene resides in genomic locus NT_{—}011295 (NCBI Genome Annotation). Bone marrow stromal cells are involved in the growth and development of B-cells. Bone marrow stromal cell antigen 2 may play a role in pre-B-cell growth and in rheumatoid arthritis.

[0087] Blast search of the Entrez human genome sequence database shows that CPS 29 overlaps or includes a chromosomal region between SLC7A1 and KIAA0774. SLC7A1 encodes solute carrier family 7 (cationic amino acid transporter, y+system), member 1. SLC7A1 has LocusID: 6541, and is located on chromosome 13 with reported cytogenetic location 13q12-q14. KIAA0774 encodes KIAA0774 protein, and has LocusID: 23281. KIAA0774 is located on chromosome 13 with reported cytogenetic location 13q12.2. Both SLC7A1 and KIAA0774 have genomic locus NT_{—}009799 (NCBI Genome Annotation). CPS 29 is located 3′ to the protein-coding regions of both genes. CPS 29 matches with the protein-coding strand of SLC7A1. SLC7A1 gene product can has strong similarity to murine Rec-1 (Atrc1), and can transport arginine, lysine and ornithine across the plasma membrane.

[0088] CPS 30 corresponds to UBE2L6 which encodes ubiquitin-conjugating enzyme E2L 6. This gene has LocusID: 9246, and is located on chromosome 11 with reported cytogenetic location 11q12. The gene resides in genomic locus NT_{—}033903 (NCBI Genome Annotation). The gene product is a member of the ubiquitin-conjugating enzyme family, and can ubiquitinate cellular proteins and mark them for degradation. The gene product can also bind to Hect domains of E3 proteins.

[0089] CPS 31 corresponds to SLC 11A1 which encodes solute carrier family 11 (proton-coupled divalent metal ion transporters), member 1. This gene has LocusID: 6556, and is located on chromosome 2 with reported cytogenetic location 2q35. The gene resides in genomic locus NT_{—}005403 (NCBI Genome Annotation). The gene product is similar to murine Bcg (Nramp1), and may control antimicrobial activity of macrophages.

[0090] CPS 32 corresponds to CDKN1C which encodes cyclin-dependent kinase inhibitor 1C (p57, Kip2). This gene has LocusID: 1028, and is located on chromosome 11 with reported cytogenetic location 11p15.5. The gene resides in genomic locus NT_{—}009368 (NCBI Genome Annotation). Cyclin-dependent kinase inhibitor 1C is a tight-binding inhibitor of several G1 cyclin/Cdk complexes and a negative regulator of cell proliferation. Mutations of CDKN1C are implicated in sporadic cancers and Beckwith-Wiedemann syndrome, suggesting that CDKN1C may be a tumor suppressor candidate.

[0091] CPS 32 also has 98% sequence identity with a chromosomal region near LOC256784. LOC256784 encodes a protein similar to cyclin-dependent kinase inhibitor 1C (Cyclin-dependent kinase inhibitor P57) (P57KIP2), and is located on chromosome 11 with genomic locus NT_{—}009368 (NCBI Genome Annotation).

[0092] CPS 33 corresponds to GAIP (RGS19) which encodes regulator of G-protein signaling 19. This gene has LocusID: 10287, and is located on chromosome 20 with reported cytogenetic location 20q13.3. The gene resides in genomic locus NT_{—}011333 (NCBI Genome Annotation). G proteins mediate a number of cellular processes. The protein encoded by this gene belongs to the RGS (regulators of G-protein signaling) family and can interact with G protein, GAI3. G-protein signaling 19 is a guanosine triphosphatase-activating protein that may function to down-regulate Galpha i/Galpha q-linked signaling.

[0093] CPS 34 corresponds to TACC2 which encodes transforming, acidic coiled-coil containing protein 2. This gene has LocusID: 10579, and is located on chromosome 10 with reported cytogenetic location 10q26. The gene resides in genomic locus NT_{—}030764 (NCBI Genome Annotation). Transforming acidic coiled-coil proteins are a conserved family of centrosome- and microtubule-interacting proteins that are implicated in cancer. The member encoded by TACC2 gene concentrates at centrosomes throughout the cell cycle, and it is a candidate breast tumor suppressor and biomarker for tumor progression.

[0094] CPS 35 corresponds to CLNS1A which encodes chloride channel, nucleotide-sensitive, 1A. This gene has LocusID: 1207, and is located on chromosome 11 with reported cytogenetic location 11q13.5-q14. The gene resides in genomic locus NT_{—}033927 (NCBI Genome Annotation). The gene product is associated with a swelling-induced chloride channel, and may be involved in aqueous humor formation in the eye

[0095] CPS 35 also has 88% sequence identity with an intron sequence of TDRKH. TDRKH encodes tudor and KH domain-containing protein, and has LocusID: 11022. It is located at chromosome 1q21. In addition, nucleotides 66-459 of CPS 35 have 89% sequence identity with a region near LOC221349. LOC221349 encodes a protein similar to chloride conductance regulatory protein ICln (I(Cln)) (Chloride channel, nucleotide sensitive 1A) (Chloride ion current inducer protein) (ClCI) (Reticulocyte PICln), and has reported cytogenetic location 6p11.2. Nucleotides 1-66 of CPS 35 aligns with LOC152922 with 98% sequence identity. LOC152922 encodes a protein similar to chloride conductance regulatory protein ICln (I(Cln)) (Chloride channel, nucleotide sensitive 1A) (Chloride ion current inducer protein) (ClCI) (Reticulocyte PICln), and is located at chromosome 4q32.3.

[0096] CPS 36 corresponds to DPYSL2 which encodes dihydropyrimidinase-like 2. This gene has LocusID: 1808, and is located on chromosome 8 with reported cytogenetic location 8p22-p21. The gene resides in genomic locus NT_{—}023666 (NCBI Genome Annotation). The gene product is a member of the dihydropyrimidinase family.

[0097] CPS 37 corresponds to FCGR3A which encodes Fc fragment of IgG, low affinity IIIa, receptor for (CD16). This gene has LocusID: 2214, and is located on chromosome 1 with reported cytogenetic location 1q23. The gene resides in genomic locus NT_{—}004668 (NCBI Genome Annotation). The gene product is type III Fc gamma receptor, and can associate with zeta chain of the T-cell receptor complex (CD3Z). The gene product is a member of the immunoglobulin superfamily

[0098] CPS 38 corresponds to UQCRC1 which encodes ubiquinol-cytochrome c reductase core protein I. This gene has LocusID: 7384, and is located on chromosome 3 with reported cytogenetic location 3p21.3. The gene resides in genomic locus NT_{—}005990 (NCBI Genome Annotation). The gene product, core I protein, is a subunit of the ubiquinol-cytochrome c oxidoreductase in the mitochondrial respiratory chain.

[0099] CPS 39 corresponds to GZMA which encodes granzyme A (granzyme 1, cytotoxic T-lymphocyte-associated serine esterase 3). This gene has LocusID: 3001, and is located on chromosome 5 with reported cytogenetic location Sq11-q12. The gene resides in genomic locus NT_{—}006431 (NCBI Genome Annotation). Cytolytic T lymphocytes (CTL) and natural killer (NK) cells share the ability to recognize, bind, and lyse specific target cells. They are thought to protect their host by lysing cells bearing on their surface “nonself” antigens, usually peptides or proteins resulting from infection by intracellular pathogens. GZMA gene product is a T cell- and natural killer cell-specific serine protease that may function as a common component necessary for lysis of target cells by cytotoxic T lymphocytes and natural killer cells.

[0100] CPS 41 corresponds to PSMB10 which encodes proteasome (prosome, macropain) subunit, beta type, 10. This gene has LocusID: 5699, and is located on chromosome 16 with reported cytogenetic location 16q22.1. The gene resides in genomic locus NT_{—}010478 (NCBI Genome Annotation). The gene can replace beta subunit PSMB7 when cells are stimulated by interferon g.

[0101] CPS 42 corresponds to IDS which encodes iduronate 2-sulfatase (Hunter syndrome). This gene has LocusID: 3423, and is located on chromosome X with reported cytogenetic location Xq28. The gene resides in genomic locus NT_{—}019686 (NCBI Genome Annotation). Iduronate-2-sulfatase is involved in the lysosomal degradation of heparan sulfate and dermatan sulfate. Mutations in this X-chromosome gene that result in enzymatic deficiency may lead to the sex-linked Mucopolysaccharidosis Type II, also known as Hunter Syndrome. Iduronate-2-sulfatase has a sequence homology with human arylsulfatases A, B, and C, and human glucosamine-6-sulfatase. A splice variant of this gene has been described.

[0102] Affymetrix annotation suggests that CPS 43 corresponds to AHNAK which encodes AHNAK nucleoprotein (desmoyokin) and has LocusID: 195. The gene is located at chromosome 11 q12-q 13.

[0103] Blast search of the Entrez human genome sequence database indicates that CPS 43 aligns with a region 3′ to LOC221087 with 100% sequence identity. LOC221087 is hypothetical gene supported by M80899. The gene is located on chromosome 11q13.1, and resides in genomic locus NT_{—}033241 (NCBI Genome Annotation).

[0104] CPS 44 corresponds to PTPN7 which encodes protein tyrosine phosphatase, non-receptor type 7. This gene has LocusID: 5778, and is located on chromosome 1 with reported cytogenetic location 1q32.1. The gene resides in genomic locus NT_{—}034408 NCBI Genome Annotation). The gene product is a member of the protein tyrosine phosphatase (PTP) family. PTPs are known to be signaling molecules that regulate a variety of cellular processes including cell growth, differentiation, mitotic cycle, and oncogenic transformation. PTPN7 gene is expressed in a variety of hematopoietic cells, and is an early response gene in lymphokine stimulated cells. The noncatalytic N-terminus of PTPN7 gene product can interact with MAP kinases and suppress the MAP kinase activities. The gene product is also shown to be involved in the regulation of T cell antigen receptor (TCR) signaling, which is thought to function through dephosphorylating the molecules related to MAP kinase pathway. At least three alternatively spliced transcript variants of this gene, which encode at least two distinct isoforms, have been reported.

[0105] CPS 45 corresponds to DUSP2 which encodes dual specificity phosphatase 2. This gene has LocusID: 1844, and is located on chromosome 2 with reported cytogenetic location 2q11. The gene resides in genomic locus NT_{—}026970 (NCBI Genome Annotation). The protein encoded by DUSP2 is a member of the dual specificity protein phosphatase subfamily. These phosphatases can inactivate their target kinases by dephosphorylating both the phosphoserine/threonine and phosphotyrosine residues. They negatively regulate members of the mitogen-activated protein (MAP) kinase superfamily (MAPK/ERK, SAPK/JNK, p38), which are associated with cellular proliferation and differentiation. Different members of the family of dual specificity phosphatases show distinct substrate specificities for various MAP kinases, different tissue distribution and subcellular localization, and different modes of inducibility of their expression by extracellular stimuli. DUSP2 gene product can inactivate ERK1 and ERK2, is expressed in hematopoietic tissues, and is localized in the nucleus.

[0106] Affymetrix annotation suggests that CPS 46 corresponds to PSMB9 which encodes proteasome (prosome, macropain) subunit, beta type, 9 (large multifunctional protease 2). PSMB9 has LocusID: 5698, and is located at chromosome 6p21.3.

[0107] Blast search of the Entrez human genome sequence database indicates that CPS 46 shows 100% sequence identity with three regions near PSMB8. These regions are within genomic locus NT_{—}007592 (NCBI Genome Annotation). PSMB8 encodes proteasome (prosome, macropain) subunit, beta type, 8 (large multifunctional protease 7). It has LocusID: 5696 and reported cytogenetic location 6p21.3.

[0108] Blast search of the Entrez human genome sequence database shows that CPS 47 overlaps or includes an intron sequence of HAN11. HAN11 encodes WD-repeat protein, and has LocusID: 10238 with reported cytogenetic location 17q21.33. HAN11 resides in genomic locus NT_{—}035428 (NCBI Genome Annotation). HAN11 gene product has WD-repeats, and is similar to plant an11.

[0109] Blast search of the Entrez human genome sequence database also shows that CPS 48 overlaps or includes LILRB1. LILRB1 encodes leukocyte immunoglobulin-like receptor, subfamily B (with TM and ITIM domains), member 1. LILRB1 has LocusID: 10859, and is located on chromosome 19 with reported cytogenetic location 19q13.4. LILRB1 resides in genomic locus NT_{—}011225 (NCBI Genome Annotation). The gene product (leukocyte immunoglobulin-like receptor B1) contains immunoreceptor tyrosine-based inhibitory motifs, and can bind to cellular and viral MHC class I antigens.

[0110] CPS 48 also aligns with LILRB2 with 91% sequence identity. LILRB2 encodes leukocyte immunoglobulin-like receptor, subfamily B (with TM and ITIM domains), member 2. The gene has LocusID: 10288 and reported cytogenetic location 19q13.4.

[0111] CPS 49 corresponds to SDR1 which encodes short-chain dehydrogenase/reductase 1. This gene has LocusID: 9249, and is located on chromosome 1 with reported cytogenetic location 1p36.1. The gene resides in genomic locus NT_{—}022041 (NCBI Genome Annotation). Short-chain dehydrogenase/reductase 1 can reduce all-trans-retinal during bleached visual pigment regeneration.

[0112] Affymetrix annotation suggests that CPS 50 corresponds to POLR2L which encodes polymerase (RNA) II (DNA directed) polypeptide L, 7.6 kDa. POLR2L has LocusID: 5441, and is located at chromosome 11p15.

[0113] CPS 51 corresponds to SCYA2 which encodes small inducible cytokine A2 (monocyte chemotactic protein 1). This gene has LocusID: 6347, and is located on chromosome 17 with reported cytogenetic location 17q11.2-q21.1. The gene resides in genomic locus NT_{—}010799 (NCBI Genome Annotation). Cytokine A 2 is a chemotactic factor for monocytes.

[0114] CPS 52 corresponds to PAI2 (SERPINB2) which encodes serine (or cysteine) proteinase inhibitor, clade B (ovalbumin), member 2. This gene has LocusID: 5055, and is located on chromosome 18 with reported cytogenetic location 18q21.3. The gene resides in genomic locus NT_{—}033907 (NCBI Genome Annotation). The gene product is also known as plasminogen activator inhibitor II, and may function as a serine protease inhibitor. It is considered a member of the serpin family of serine protease inhibitors.

[0115] Blast search of the Entrez human genome sequence database shows that CPS 53 overlaps or includes LOC158972. LOC158972 has reported cytogenetic location Xq28, and is located in genomic locus NT_{—}026504 (NCBI Genome Annotation).

[0116] CPS 53 also aligns with a chromosomal region near LOC93052 with 93% sequence identity. LOC93052 has reported cytogenetic location Xq28.

[0117] Blast search of the Entrez human genome sequence database shows that CPS 54 overlaps or includes KIAA1564. KIAA1564 encodes KIAA1564 protein, and has LocusID: 57680 with reported cytogenetic location 14q11.1. KIAA1564 resides in genomic locus NT_{—}025892 (NCBI Genome Annotation). CPS 54 matches with the non-protein-coding strand of KIAA1564.

[0118] Affymetrix annotation indicates that CPS 55 corresponds to JMJ. Nucleotides 1997 to 198161 of AL021938 (SEQ ID NO:52) have 99% sequence identity with JMJ. JMJ encodes jumonji homolog (mouse), and has LocusID: 3720. The gene is located on chromosome 6 with reported cytogenetic location 6p24-p23 and genomic locus NT_{—}007592 (NCBI Genome Annotation). JMJ is an ortholog of the mouse jumonji gene, which encodes a nuclear protein involved in mouse embryogenesis, including neural tube formation. Overexpression of mouse jumonji negatively regulates cell proliferation. The jumonji proteins contain a DNA-binding domain, called an AT-rich interaction domain (ARID), and share regions of similarity with human retinoblastoma-binding protein-2 and the human SMCX protein. Nucleotides 1997 to 198161 of AL021938 match with the non-protein-coding strand of JMJ.

[0119] Nucleotides 1 to 66 of CPS 55 have 100% sequence identity with a chromosomal region in genomic locus NT_{—}010463 (NCBI Genome Annotation). This chromosomal region is located 3′ to LOC222499 which has reported cytogenetic location 16q21.

[0120] CPS 56 corresponds to UGP2 which encodes UDP-glucose pyrophosphorylase 2. This gene has LocusID: 7360, and is located on chromosome 2 with reported cytogenetic location 2p14-p13. The gene resides in genomic locus NT_{—}005375 (NCBI Genome Annotation). The enzyme encoded by UGP2 is an intermediary in mammalian carbohydrate interconversions. It can transfer a glucose moiety from glucose-1-phosphate to MgUTP and form UDP-glucose and MgPPi.

[0121] Nucleotides 155 to 433 of CPS 56 have 0.96% sequence identity with LOC253415. LOC253415 encodes a protein similar to UDP-glucose pyrophosphorylase 2 (UTP-glucose-1-phosphate uridyltransferase) (UDP-glucose diphosphorylase) (UGPase 2). LOC253415 is located on chromosome 2.

[0122] CPS 57 corresponds to KIAA0410. This gene has LocusID: 9818, and is located on chromosome 13 with reported cytogenetic location 13q12.12. The gene resides in genomic locus NT_{—}009799 (NCBI Genome Annotation).

[0123] CPS 58 corresponds to NDUFS7 which encodes NADH dehydrogenase (ubiquinone) Fe-S protein 7 (20 kD) (NADH-coenzyme Q reductase). This gene has LocusID: 4727, and is located on chromosome 19 with reported cytogenetic location 19p13. The gene resides in genomic locus NT_{—}011268 (NCBI Genome Annotation).

[0124] CPS 59 corresponds to KIAA0645. This gene has LocusID: 9681, and is located on chromosome 22 with reported cytogenetic location 22q12.3. The gene resides in genomic locus NT_{—}011520 (NCBI Genome Annotation).

[0125] CPS 60 corresponds to GSTP1 which encodes glutathione S-transferase pi. This gene has LocusID: 2950, and is located on chromosome 11 with reported cytogenetic location 11q13. The gene resides in genomic locus NT_{—}033241 (NCBI Genome Annotation). Glutathione S-transferases (GSTs) are a family of enzymes that play a role in detoxification by catalyzing the conjugation of many hydrophobic and electrophilic compounds with reduced glutathione. The soluble GSTs are categorized into 4 main classes: alpha, mu, pi, and theta. The glutathione S-transferase pi gene (GSTP1) is a polymorphic gene encoding active, functionally different GSTP1 variant proteins that are thought to function in xenobiotic metabolism and play a role in susceptibility to cancer, and other diseases.

[0126] Nucleotides 180 to 558 have 86% sequence identity with a chromosomal region near DGKA. DGK encodes diacylglycerol kinase, alpha (80 kD), and is located at chromosome 12q13.3 with LocusID: 1606.

[0127] CPS 61 corresponds to DECR1 which encodes 2,4-dienoyl CoA reductase 1, mitochondrial. This gene has LocusID: 1666, and is located on chromosome 8 with reported cytogenetic location 8q21.3. The gene resides in genomic locus NT_{—}034898 (NCBI Genome Annotation). The gene product is an accessory enzyme which participates in the beta-oxidation and metabolism of unsaturated fatty enoyl-CoA esters.

[0128] CPS 62 corresponds to PLXNC1 which encodes plexin C1. This gene has LocusID: 10154, and is located on chromosome 12 with reported cytogenetic location 12q23.3. The gene resides in genomic locus NT_{—}009575 (NCBI Genome Annotation). Plexin C1 can function as a receptor for virally-encoded semphorin. It is a member of the plexin family.

[0129] CPS 63 corresponds to TUBA2 which encodes tubulin, alpha 2. This gene has LocusID: 7278, and is located on chromosome 13 with reported cytogenetic location 13q11. The gene resides in genomic locus NT_{—}009799 (NCBI Genome Annotation). Microtubules of the eukaryotic cytoskeleton perform essential and diverse functions and are composed of a heterodimer of alpha and beta tubulin. The genes encoding these microtubule constituents are part of the tubulin superfamily, which is composed of six distinct families. Genes from the alpha, beta and gamma tubulin families are found in all eukaryotes. The alpha and beta tubulins represent the major components of microtubules, while gamma tubulin plays a critical role in the nucleation of microtubule assembly. There are multiple alpha and beta tubulin genes and they are conserved among and between species. TUBA2 gene is an alpha tubulin gene that encodes a protein similar to the mouse testis-specific Tuba3 and Tuba7 gene products. TUBA2 gene is located in the 13q11 region, which is associated with the genetic diseases Clouston hidrotic ectodermal dysplasia and Kabuki syndrome. Alternative splicing has been observed for this gene and at least two variants have been identified.

[0130] CPS 63 has 95-96% sequence identity with H2-ALPHA and LOC112714. H2-ALPHA encodes alpha-tubulin isotype H2-alpha, and has LocusID: 113457 with reported cytogenetic location 2q22.1. LOC112714 encodes a protein similar to alpha tubulin, and has LocusID: 112714 with reported cytogenetic location 2q14.2.

[0131] In addition, CPS 63 shows 85-90% sequence identity with a chromosomal region near MGC16703. MGC16703 encodes alpha tubulin-like, and is located at chromosome 22q11.21 with LocusID: 113691. Fragments of CPS have 83-91% sequence identity with regions on chromosomes 1 and 22.

[0132] CPS 64 corresponds to NME1 which encodes non-metastatic cells 1, protein (NM23A) expressed in. This gene has LocusID: 4830, and is located on chromosome 17 with reported cytogenetic location 17q21.3. The gene resides in genomic locus NT_{—}010783 (NCBI Genome Annotation). NME1 was reported to have reduced mRNA transcript levels in highly metastatic cells. NME1 encodes the “A” isoform of nucleoside diphosphate kinase (NDK). NDK exists as a hexamer composed of the “A” (encoded by NME1) and “B” (encoded by NME2) isoforms. Mutations in NME1 have been identified in aggressive neuroblastomas. NME1 gene product may have a role in the transcriptional regulation of c-myc expression.

[0133] Blast search of the Entrez human genome sequence database shows that CPS 65 overlaps or includes a chromosomal region between SLC11A1 and NLI-IF. Both genes are located on chromosome 2 with reported cytogenetic location 2q35 and genomic locus NT_{—}005403 (NCBI Genome Annotation). SLC11A1 encodes solute carrier family 11 (proton-coupled divalent metal ion transporters), member 1, and has LocusID: 6556. SLC11A1 gene product is similar to murine Bcg (Nramp1), and may control antimicrobial activity of macrophages. NLI-IF encodes nuclear LIM interactor-interacting factor, and has LocusID: 58190. NLI-IF gene product is similar to a region of S. cerevisiae plasma membrane phosphatase Psr2p. CPS 65 is located 3′ to the protein-coding sequence of SLC11A1 and 5′ to the protein-coding sequence of NL1-IF.

[0134] Affymetrix annotation suggests that CPS 66 corresponds to RNAHP which encodes RNA helicase-related protein and has LocusID: 11325. The gene has reported cytogenetic location at chromosome 17q22.

[0135] Blast search of the Entrez human genome sequence database shows that CPS 66 aligns with a chromosomal region at chromosome 16q13 with at least 95% sequence identity. This region resides in genomic locus NT_{—}010498 (NCBI Genome Annotation), and is located near MT1G. MT1G encodes metallothionein 1G, and has LocusID: 4495.

[0136] In addition, CPS 66 has 83-92% sequence identity with various regions on chromosomes 1, 4, 9, 16 and 20. These regions include MT1H, MT2P1, LOC255917, LOC127544, LOC149450, a region near MGC10731, and a region near MMP24. MT1H encodes metallothionein 1H, and has LocusID: 4496 with reported cytogenetic location 16q13. MT2P1 encodes metallothionein 2 pseudogene 1 (processed), and is located at chromosome 4p11-q21 (LocusID: 4503). MGC10731 has LocusID: 79363, and is located at chromosome 1p36.13. LOC255917 encodes a protein similar to Metallothionein-IE (MT-IE), and is located on chromosome 9. LOC127544 encodes a protein similar to dj1174N9.1 (novel protein with IBR domain), and is located at chromosome 1p34.3. LOC149450 has reported cytogenetic location 1q42.3. MMP24 encodes matrix metalloproteinase 24 (membrane-inserted), and is located at chromosome 20q11.2 with LocusID: 10893.

[0137] CPS 67 corresponds to ZNF198 which encodes zinc finger protein 198. This gene has LocusID: 7750, and is located on chromosome 13 with reported cytogenetic location 13q11-q12. The gene resides in genomic locus NT_{—}009799 (NCBI Genome Annotation). Zinc-finger protein 198 contains zinc fingers.

[0138] Nucleotides 185-221 of CPS 67 have 100% sequence identity with an intron sequence of LOC205936. LOC205936 is located at chromosome 4 p16.2, and resides in genomic locus NT_{—}006051 (NCBI Genome Annotation).

[0139] CPS 68 corresponds to PRCP which encodes prolylcarboxypeptidase (angiotensinase C). This gene has LocusID: 5547, and is located on chromosome 11 with reported cytogenetic location 11q14. The gene resides in genomic locus NT_{—}033927 (NCBI Genome Annotation). Prolylcarboxypeptidase (angiotensinase C) is a serine carboxypeptidase and can remove residues linked to proline.

[0140] CPS 70 corresponds to DKFZP586A0522 which encodes DKFZP586A0522 protein. This gene has LocusID: 25840, and is located on chromosome 12 with reported cytogenetic location 12q11. The gene resides in genomic locus NT_{—}009782 (NCBI Genome Annotation). The gene product include a region with low sequence similarity to a region of S. cerevisiae Coq5p. DKFZP586A0522 overlaps with LOC196529 which is encodes a protein similar to DKFZP586A0522 protein.

[0141] CPS 71 corresponds to SFRS11 which encodes splicing factor, arginine/serine-rich 11. This gene has LocusID: 9295, and is located on chromosome 1 with reported cytogenetic location 1p21-p34. The gene resides in genomic locus NT_{—}004464 (NCBI Genome Annotation). The gene product contains arginine/serine-rich domain and an RRM domain, and may have a role in pre-mRNA splicing.

[0142] Nucleotides 1 to 234 of CPS 71 have 89% sequence identity with an intron sequence of PEPP2. PEPP2 encodes phosphoinositol 3-phosphate-binding protein-2, and has LocusID: 54477 with reported cytogenetic location 12p12.

[0143] CPS 72 corresponds to RAC2 which encodes ras-related C3 botulinum toxin substrate 2 (rho family, small GTP binding protein Rac2). This gene has LocusID: 5880, and is located on chromosome 22 with reported cytogenetic location 22q13.1. The gene resides in genomic locus NT_{—}011520 (NCBI Genome Annotation). The protein encoded by RAC2 is a GTPase which belongs to the RAS superfamily of small GTP-binding proteins. Members of this superfamily appear to regulate a diverse array of cellular events, including the control of cell growth, cytoskeletal reorganization, and the activation of protein kinases. The RAC2 gene product may be a target for ADP ribosylation by the C3 subunit of botulinum toxin.

[0144] Nucleotides 400 to 487 of CPS 72 have 95% sequence identity with STK17A. STK17A encodes serine/threonine kinase 17a (apoptosis-inducing), and has LocusID: 9263 with reported cytogenetic location 7p12-p14.

[0145] CPS 73 corresponds to ZFP103 which encodes zinc finger protein 103 homolog (mouse). This gene has LocusID: 7844, and is located on chromosome 2 with reported cytogenetic location 2p11.2. The gene resides in genomic locus NT_{—}015805 NCBI Genome Annotation). The gene product contains a zinc-finger domain, and may be associated with membranous protein sorting.

[0146] CPS 74 corresponds to LOC51580 which encodes H-2K binding factor-2. This gene has LocusID: 51580, and is located on chromosome 9. The gene resides in genomic locus NT_{—}006316 (NCBI Genome Annotation). The gene product is a member of the recombination signal-sequence binding protein family. It is a transcription factor that binds to the NFkB site of MHC class I genes.

[0147] CPS 75 corresponds to NRD1 which encodes nardilysin (N-arginine dibasic convertase). This gene has LocusID: 4898, and is located on chromosome 1 with reported cytogenetic location 1p32.2-p32.1. The gene resides in genomic locus NT_{—}004424 (NCBI Genome Annotation). N-arginine dibasic convertase (NRD convertase) is a zinc-dependent endopeptidase. It is a member of the insulinase family.

[0148] Blast search of the Entrez human genome sequence database shows that CPS 76 overlaps or includes the 3′ untranslated region of FLJ20154. FLJ20154 encodes hypothetical protein FLJ20154, and is located at chromosome 10q24.32 with LocusID: 54838. FLJ20154 resides in genomic locus NT_{—}030059 (NCBI Genome Annotation).

[0149] CPS 76 also has 85-88% sequence identity with an intron sequence of KIAA0103, a chromosome 13 region near LOC160822, and a chromosome 7 region near BAP29. KIAA0103 has LocusID: 9694 and reported cytogenetic location 8q23.1. LOC160822 encodes a protein similar to hypothetical protein FLJ12457, and is located at chromosome 13q31.1. BAP29 encodes B-cell receptor-associated protein BAP29, and is located at chromosome 7q22.2 with LocusID: 55973. Moreover, fragments of CPS 76 align with various other regions on chromosome 1, 6, 15 and 19 with 89-90% sequence identity.

[0150] Affymetrix annotation suggests that CPS 77 corresponds to KIAA0906, also known as NUP210 which encodes nucleoporin 210. The gene has LocusID: 23225, and is located at chromosome 3p25.1.

[0151] Blast search of the Entrez human genome sequence database shows that CPS 77 aligns with FLJ22389 with at least 99% sequence identity. FLJ22389 has LocusID: 79985, and is located on chromosome 3 with reported cytogenetic location 3p25.1. The gene resides in genomic locus NT_{—}005927 (NCBI Genome Annotation).

[0152] Affymetrix annotation suggests that CPS 78 corresponds to MT1F which encodes metallothionein 1F (functional) and has LocusID: 4494. The gene is located at 16q13.

[0153] Blast search of the Entrez human genome sequence database shows that CPS 78 has 100% sequence identity with a chromosomal region located 3′ to the protein-coding sequence of MT1G. This chromosomal region, as well as MT1G, are within genomic locus NT_{—}010498 (NCBI Genome Annotation) on chromosome 16. MT1G encodes metallothionein 1G, and has LocusID: 4495 with reported cytogenetic location 16q13.

[0154] Nucleotides 1 to 67 of CPS 78 have 90-95% sequence identity to various regions in genomic locus NT_{—}010498. These regions include MT2A, LOC221228, MT1G and MT1L. MT2A encodes metallothionein 2A, and has LocusID: 4502 with reported cytogenetic location 16q13. LOC221228 is a hypothetical gene supported by AF495759. MT1G encodes metallothionein IG. MT1L encodes metallothionein IL, and has LocusID: 4500 with reported cytogenetic location 16q13.

[0155] In addition, CPS 78, and certain fragments thereof, have 89-93% sequence identity with MT2P1, LOC127544, LOC255917, a chromosomal region near MMP24, a chromosomal region near MGC 10731, and a chromosomal region near LOC 149450. MT2P1 encodes metallothionein 2 pseudogene 1 (processed), and has LocusID: 4503 with reported cytogenetic location 4p11-q21. LOC127544 encodes a protein similar to dJ1174N9.1 (novel protein with IBR domain), and is located at chromosome 1p34.3. LOC255917 encodes a protein similar to metallothionein-IE (MT-1E), and is located on chromosome 9. MMP24 encodes matrix metalloproteinase 24 (membrane-inserted), and is located at chromosome 20q11.2 with LocusID: 10893. MGC10731 encodes hypothetical protein MGC10731, and has LocusID: 79363 with reported cytogenetic location 1p36.13. LOC149450 is located at chromosome 1q42.3.

[0156] CPS 79 corresponds to P85SPR (ARHGEF7) which encodes Rho guanine nucleotide exchange factor (GEF) 7. This gene has LocusID: 8874, and is located on chromosome 13 with reported cytogenetic location 13q34. The gene resides in genomic locus NT_{—}009952 (NCBI Genome Annotation). Rho GTPases are involved in numerous cellular processes that are initiated by extracellular stimuli that work through G protein coupled receptors. The protein encoded by P85SPR belongs to a family of cytoplasmic proteins that activate the Ras-like family of Rho proteins by exchanging bound GDP for GTP. The encoded protein may form a complex with G proteins and stimulate Rho-dependent signals. The protein can induce membrane ruffling. The gene product is also involved in Pak recruitment to Cdc42- and Rac1-driven focal complexes. Multiple alternatively spliced transcript variants encoding different isoforms have been described for this gene.

[0157] CPS 80 corresponds to UNK_N53547 (MGC5508) which encodes hypothetical protein MGC5508. This gene has LocusID: 79073, and is located on chromosome 11 with reported cytogenetic location 11q13.1. The gene resides in genomic locus NT_{—}033903 (NCBI Genome Annotation).

[0158] CPS 81 corresponds to GPRK5 which encodes G protein-coupled receptor kinase 5. This gene has LocusID: 2869, and is located on chromosome 10 with reported cytogenetic location 10q24-qter. The gene resides in genomic locus NT_{—}008902 (NCBI Genome Annotation). G protein-coupled receptor kinases (GRKs) play a role in phosphorylating and regulating the activity of a variety of G protein-coupled receptors. G protein-coupled receptor kinase 5 can phosphorylate agonist-stimulated G protein-coupled receptors.

[0159] CPS 83 corresponds to SCYA7 which encodes small inducible cytokine A7 (monocyte chemotactic protein 3). This gene has LocusID: 6354, and is located on chromosome 17 with reported cytogenetic location 17q11.2-q12. The gene resides in genomic locus NT_{—}010799 (NCBI Genome Annotation). Monocyte chemotactic protein 3 is a secreted chemokine which attracts macrophages during inflammation and metastasis. It is a member of the C—C subfamily of chemokines which are characterized by having two adjacent cysteine residues. The protein is an in vivo substrate of matrix metalloproteinase 2, an enzyme which degrades components of the extracellular matrix. SCYA7 gene is part of a cluster of C—C chemokine family members on chromosome 17q.

[0160] CPS 84 corresponds to TUBA3 which encodes tubulin, alpha 3. This gene has LocusID: 7846, and is located on chromosome 12 with reported cytogenetic location 12q12-12q14.3. The gene resides in genomic locus NT_{—}009526 (NCBI Genome Annotation). There are multiple alpha and beta tubulin genes, which are conserved among species. TUBA3 encodes alpha tubulin and is similar to mouse and rat Tuba1 gene. Northern blotting studies have shown the gene expression in morphologically differentiated neurologic cells. TUBA3 is one of three alpha-tubulin genes in a cluster on chromosome 12q.

[0161] CPS 84 also has 97% sequence identity with a chromosomal region located 3′ to LOC 134262. LOC 134262 encodes a protein similar to alphaTub84B gene product. The gene is located at 5 μl 1, and resides in genomic locus NT_{—}023098.

[0162] CPS 85 corresponds to SCML2 which encodes sex comb on midleg-like 2 (Drosophila). This gene has LocusID: 10389, and is located on chromosome X with reported cytogenetic location Xp22. The gene resides in genomic locus NT_{—}011586 (NCBI Genome Annotation). The gene product is similar to Drosophila Scm.

[0163] CPS 85 also aligns with SCML1 with 94% sequence identity. SCML1 encodes sex comb on midleg-like 1 (Drosophila). The gene has LocusID: 6322, and is located on chromosome X with reported cytogenetic location Xp22.2-p22.1. The gene resides in genomic locus NT_{—}011586.

[0164] CPS 87 corresponds to ILIR1 which encodes interleukin 1 receptor, type I. This gene has LocusID: 3554, and is located on chromosome 2 with reported cytogenetic location 2q12. The gene resides in genomic locus NT_{—}022171 (NCBI Genome Annotation). Type I interleukin-1 receptor contains immmunoglobulin domains, and can bind to all three forms of interleukin-1 (IL1A, IL1B, and IL1RN).

[0165] CPS 88 corresponds to UNK_AL008729 (LOC221692) which encodes a protein similar to KIAA1733 protein. This gene is located on chromosome 6 with reported cytogenetic location 6p22.3. The gene resides in genomic locus NT_{—}007592 (NCBI Genome Annotation). LOC221692 is located within LOC51256 which has LocusID: 51256. CPS 88 matches with the non-protein-coding strand of LOC51256.

[0166] CPS 89 corresponds to KIAA0191 which encodes KIAA0191 protein. This gene has LocusID: 23318, and is located on chromosome 1 with reported cytogenetic location 1p32.3. The gene resides in genomic locus NT_{—}004424 (NCBI Genome Annotation).

[0167] CPS 90 corresponds to EGFL5 which encodes EGF-like-domain, multiple 5. This gene has LocusID: 1955, and is located on chromosome 9 with reported cytogenetic location 9q32-q33.3. The gene resides in genomic locus NT_{—}017568 (NCBI Genome Annotation).

[0168] CPS 91 corresponds to DUSPI which encodes dual specificity phosphatase 1. This gene has LocusID: 1843, and is located on chromosome 5 with reported cytogenetic location 5q34. The gene resides in genomic locus NT_{—}023132 (NCBI Genome Annotation). The expression of DUSPI gene can be induced in human skin fibroblasts by oxidative/heat stress and growth factors. The bacterially expressed and purified DUSPI protein has intrinsic phosphatase activity, and can inactivate mitogen-activated protein (MAP) kinase in vitro by the concomitant dephosphorylation of both its phosphothreonine and phosphotyrosine residues. DUSPI protein can also suppress the activation of MAP kinase by oncogenic ras in extracts of Xenopus oocytes. Thus, DUSPI may play a role in the human cellular response to environmental stress as well as in the negative regulation of cellular proliferation.

[0169] CPS 92 corresponds to FBP1 which encodes fructose-1,6-bisphosphatase 1. This gene has LocusID: 2203, and is located on chromosome 9 with reported cytogenetic location 9q22.3. The gene resides in genomic locus NT_{—}008476 (NCBI Genome Annotation). Fructose-1,6-bisphosphatase 1 is a gluconeogenesis regulatory enzyme. It can catalyze the hydrolysis of fructose 1,6-bisphosphate to fructose 6-phosphate and inorganic phosphate. Fructose-1,6-diphosphatase deficiency is associated with hypoglycemia and metabolic acidosis.

[0170] CPS 93 corresponds to HRB which encodes HIV-1 Rev binding protein. This gene has LocusID: 3267, and is located on chromosome 2 with reported cytogenetic location 2q36. The gene resides in genomic locus NT_{—}005403 (NCBI Genome Annotation). HIV-1 Rev binding protein can interact with the activation domains of the HIV-1 Rev protein, and may be related to nucleoporins, a class of proteins that mediate nucleocytoplasmic transport. HIV-1 Rev binding protein binds to the Rev activation domain when Rev is assembled onto its RNA target and can significantly enhance Rev activity when over-expressed. The HRB gene can expressed as a major 2.8-kb and a minor 4.6-kb mRNA.

[0171] CPS 94 corresponds to NAGA which encodes N-acetylgalactosaminidase, alpha-. This gene has LocusID: 4668, and is located on chromosome 22 with reported cytogenetic location 22q13-qter. The gene resides in genomic locus NT_{—}011520 (NCBI Genome Annotation). The lysosomal enzyme alpha-N-acetylgalactosaminidase can cleave alpha-N-acetylgalactosaminyl moieties from glycoconjugates. Mutations in NAGA have been implicated as the cause of Schindler disease types I and II (type II also known as Kanzaki disease).

[0172] CPS 95 corresponds to GLRX which encodes glutaredoxin (thioltransferase). This gene has LocusID: 2745, and is located on chromosome 5 with reported cytogenetic location 5q14. The gene resides in genomic locus NT_{—}023148 (NCBI Genome Annotation). Glutaredoxin can function as a glutathione-dependent hydrogen donor for ribonucleotide reductase.

[0173] Fragments of CPS 95 also align with AF358259, a chromosomal region near GABRA6 and a chromosomal region near GLRXP with 86-90% sequence identity. AF358259 encodes glutaredoxin pseudogene 2, and has LocusID: 171418 with reported cytogenetic location 14q32.13-q32.2. GABRA6 encodes gamma-aminobutyric acid (GABA) A receptor, alpha 6. It has LocusID: 2559, and is located at chromosome 5q34. GLRXP encodes glutaredoxin (thioltransferase) pseudogene, and is located at chromosome 20q11.2 with LocusID: 170522. In addition, nucleotides 1 to 29 of CPS 95 has 100% sequence identity with LOC257079. LOC257079 encodes a protein similar to glutaredoxin (Thioltransferase) (TTase), and is located on chromosome 5.

[0174] CPS 96 corresponds to UNK_W28281 (GABARAPL1) which encodes GABA(A) receptor-associated protein like 1. This gene has LocusID: 23710, and is located on chromosome 12 with reported cytogenetic location 12p13.1. The gene resides in genomic locus NT_{—}035207 (NCBI Genome Annotation).

[0175] SEQ ID NO: 360, which can be used as a probe sequence for detecting the expression level of UNK_W28281, also aligns with GABARAPL3 with about 95% sequence identity. GABARAPL3 encodes GABA(A) receptors associated protein like 3. It has LocusID: 23766, and is located on chromosome 15 with reported cytogenetic location 15q25.1.

[0176] CPS 97 corresponds to UNK_AL096740 (UBE3B) which encodes ubiquitin protein ligase. This gene has LocusID: 89910, and is located on chromosome. 12 with reported cytogenetic location 12q24.11. The gene resides in genomic locus NT_{—}009770 (NCBI Genome Annotation).

[0177] CPS 98 corresponds to TBXAS1 which encodes thromboxane A synthase 1 (platelet, cytochrome P450, subfamily V). This gene has LocusID: 6916, and is located on chromosome 7 with reported cytogenetic location 7q34-q35. The gene resides in genomic locus NT_{—}007914 (NCBI Genome Annotation). The gene product is a member of the cytochrome P450 superfamily of enzymes. The cytochrome P450 proteins are monooxygenases which catalyze many reactions involved in drug metabolism and synthesis of cholesterol, steroids and other lipids. TBXAS1 gene product is considered a member of the cytochrome P450 superfamily on the basis of sequence similarity rather than functional similarity. It is an endoplasmic reticulum membrane protein, and can catalyze the conversion of prostglandin H2 to thromboxane A2, a potent vasoconstrictor and inducer of platelet aggregation. TBXAS1 gene product may play a role in several pathophysiological processes including hemostasis, cardiovascular disease, and stroke. The gene expresses at least two transcript variants.

[0178] CPS 99 corresponds to DPYD which encodes dihydropyrimidine dehydrogenase. This gene has LocusID: 1806, and is located on chromosome 1 with reported cytogenetic location 1p22. The gene resides in genomic locus NT_{—}034389 (NCBI Genome Annotation). Dihydropyrimidine dehydrogenase is a pyrimidine catabolic enzyme which is involved in the initial and rate-limiting step in the pathway of uracil and thymidine catabolism and also in the pathway leading to the formation of beta-alanine. The DPYD gene is a large gene of approximately 150 kb consisting of at least 23 exons encoding a protein of approximately 111-kDa. Genetic deficiency of DPYD enzyme results in an error in pyrimidine metabolism associated with thymine-uraciluria and an increased risk of toxicity in cancer patients receiving 5-flourouracil chemotherapy.

[0179] Affymetrix annotation suggests that CPS 100 corresponds to ECGF1 which encodes endothelial cell growth factor 1 (platelet-derived). Nucleotides 4 to 120 of M63193 (SEQ ID NO: 94) align with ECGF1. This gene has LocusID: 1890, and is located on chromosome 22 with reported cytogenetic location 22q13.33. The gene resides in genomic locus NT_{—}011526 (NCBI Genome Annotation).

[0180] CPS 100 aligns with SCO2 with at least 98% sequence identity. SCO2 encodes SCO cytochrome oxidase deficient homolog 2 (yeast). It has LocusID: 9997, and is located on chromosome 22 with reported cytogenetic location 22q13.33. The gene resides in genomic locus NT_{—}011526. Mammalian cytochrome c oxidase (COX) catalyzes the transfer of reducing equivalents from cytochrome c to molecular oxygen and pumps protons across the inner mitochondrial membrane. In yeast, two related COX assembly genes, yeast SCO1 and SCO2 (synthesis of cytochrome c oxidase), enable subunits 1 and 2 to be incorporated into the holoprotein. SCO2 is the human homolog of the yeast SCO2 gene.

[0181] Affymetrix annotation suggests that CPS 101 corresponds to TIMP1 which encodes tissue inhibitor of metalloproteinase 1 (erythroid potentiating activity, collagenase inhibitor). The gene has LocusID: 7076, and is located at chromosome Xp11.3-p11.23.

[0182] Blast search of the Entrez human genome sequence database shows that CPS 101 aligns with an intron sequence of SYN1 with at least 97% sequence identity. SYN1 encodes synapsin I, and has LocusID: 6853 with reported cytogenetic location Xp11.23. The gene resides in genomic locus NT_{—}011568. CPS 101 matches with the non-protein-coding strand of SYN 1.

[0183] CPS 102 corresponds to GSN which encodes gelsolin (amyloidosis, Finnish type). This gene has LocusID: 2934, and is located on chromosome 9 with reported cytogenetic location 9q33. The gene resides in genomic locus NT_{—}017568 (NCBI Genome Annotation). Gelsolin is a calcium-dependent protein which may function to sever and cap actin filaments.

[0184] CPS 103 corresponds to SECTM1 which encodes secreted and transmembrane 1. This gene has LocusID: 6398, and is located on chromosome 17 with reported cytogenetic location 17q25. The gene resides in genomic locus NT_{—}025911 (NCBI Genome Annotation). The gene product is a transmembrane and secreted protein with characteristics of a type 1a transmembrane protein. It is found in a perinuclear Golgi-like pattern and thought to be involved in hematopoietic or immune system processes. The gene product may have a role in hematopoiesis or immune processes.

[0185] CPS 104 corresponds to OLR1 which encodes oxidised low density lipoprotein (lectin-like) receptor 1. This gene has LocusID: 4973, and is located on chromosome 12 with reported cytogenetic location 12 p13.2-p12.3. The gene resides in genomic locus NT_{—}035207 (NCBI Genome Annotation). Lectin-like oxidized low density lipoprotein receptor is a member of the C-type lectin receptor family, and may be involved in degradation of oxidized LDL by vascular endothelial cells.

[0186] CPS 105 corresponds to D6S49E (LST1) which encodes leukocyte specific transcript 1. This gene has LocusID: 7940, and is located on chromosome 6 with reported cytogenetic location 6p21.3. The gene resides in genomic locus NT_{—}007592 (NCBI Genome Annotation). The gene product is expressed in leukocytes and induced by IFN-gamma. It possibly functions in the immune response of monocytes and T cells.

[0187] CPS 106 corresponds to JUNB which encodes jun B proto-oncogene. This gene has LocusID: 3726, and is located on chromosome 19 with reported cytogenetic location 19p13.2. The gene resides in genomic locus NT_{—}011176 (NCBI Genome Annotation). The gene product may participate in AP-1 transcriptional activation.

[0188] CPS 107 corresponds to PFC which encodes properdin P factor, complement. This gene has LocusID: 5199, and is located on chromosome X with reported cytogenetic location Xp11.3-p11.23. The gene resides in genomic locus NT_{—}011568 (NCBI Genome Annotation). The gene product contains a related type-I repeat sequence, and may play a role in complement-mediated clearance.

[0189] CPS 108 corresponds to POLR2E which encodes polymerase (RNA) II (DNA directed) polypeptide E (25 kD). This gene has LocusID: 5434, and is located on chromosome 19 with reported cytogenetic location 19p13.3. The gene resides in genomic locus NT_{—}011277 (NCBI Genome Annotation). This gene encodes a subunit of RNA polymerase II, the polymerase responsible for synthesizing messenger RNA in eukaryotes. The encoded subunit is shared by the other two DNA-directed RNA polymerases and is present in two-fold molar excess over the other polymerase subunits. An interaction between this subunit and a hepatitis virus transactivating protein has been demonstrated, suggesting that interaction between transcriptional activators and the polymerase can occur through this subunit. A pseudogene is located on chromosome 11.

[0190] CPS 109 corresponds to THBS1 which encodes thrombospondin 1. This gene has LocusID: 7057, and is located on chromosome 15 with reported cytogenetic location 1Sq15. The gene resides in genomic locus NT_{—}030828 (NCBI Genome Annotation). Thrombospondin-1 is a member of a family of adhesive molecules. It has a role in blood clotting and in angiogenesis.

[0191] CPS 110 corresponds to HK2 which encodes hexokinase 2. This gene has LocusID: 3099, and is located on chromosome 2 with reported cytogenetic location 2p13. The gene resides in genomic locus NT_{—}022184 (NCBI Genome Annotation). Hexokinases phosphorylate glucose to produce glucose-6-phosphate, thus committing glucose to the glycolytic pathway. HK2 gene encodes hexokinase 2, the predominant form found in skeletal muscle. The gene product localizes to the outer membrane of mitochondria. Expression of this gene is insulin-responsive, and studies in rat suggest that it is involved in the increased rate of glycolysis seen in rapidly growing cancer cells.

[0192] CPS 110 also aligns with a chromosomal region near LOC139132 with about 95% sequence identity. Both the chromosomal region and LOC139132 reside in genomic locus NT_{—}011597. LOC139132 encodes a protein similar to WW domain binding protein 11 (SH3 domain-binding protein SNP70) (Npw38-binding protein NpwBP), and is located at Xq13.2.

[0193] Affymetrix annotation suggests that CPS 111 corresponds to INSIG1 which encodes insulin induced gene 1. The gene has LocusID: 3638 and is located at chromosome 7q36.

[0194] Blast search of the Entrez human genome sequence database shows that CPS 111 has about 80-85% sequence identity with a chromosomal region near LOC131742. This chromosomal region and LOC131742 reside in genomic locus NT_{—}022554. LOC131742 has reported cytogenetic location 3p12.1-p11.2.

[0195] CPS 112 corresponds to HCK which encodes hemopoietic cell kinase. This gene has LocusID: 3055, and is located on chromosome 20 with reported cytogenetic location 20q11-q12. The gene resides in genomic locus NT_{—}028392 (NCBI Genome Annotation). The gene product can function as a non-receptor protein tyrosine kinase.

[0196] Affymetrix annotation suggests that CPS 113 corresponds to HP10390, alos known as TMEM4 which encodes transmembrane protein 4. The gene has LocusID: 10330, and is located at chromosome 12q15.

[0197] Blast search of the Entrez human genome sequence database shows that CPS 113 aligns with two regions with 100% sequence identity. The first region is located in an intron of TIMELESS. The second region is located 5′ to the polypeptide-coding sequence of TIMELESS. TIMELESS encodes timeless homolog (Drosophila). It has LocusID: 8914, and is located on chromosome 12 with reported cytogenetic location 12q12-q13. The gene resides in genomic locus NT_{—}009458 (NCBI Genome Annotation). The gene product may be involved in circadian oscillation autoregulation.

[0198] CPS 114 corresponds to UNK_U51712 (LAGY) which encodes lung cancer-associated Y protein. This gene has LocusID: 84525, and is located on chromosome 4 with reported cytogenetic location 4q11-q12. The gene resides in genomic locus NT_{—}022853 (NCBI Genome Annotation). Multiple alternatively spliced transcript variants have been described for this gene.

[0199] CPS 115 corresponds to which encodes KIAA0217 which encodes KIAA0217 protein. This gene has LocusID: 23185, and is located on chromosome 10 with reported cytogenetic location 10p15.3. The gene resides in genomic locus NT_{—}024115 (NCBI Genome Annotation).

[0200] CPS 116 corresponds to NCF1 which encodes neutrophil cytosolic factor 1 (47 kD, chronic granulomatous disease, autosomal 1). This gene has LocusID: 4687, and is located on chromosome 7 with reported cytogenetic location 7q11.23. The gene resides in genomic locus NT_{—}034886 (NCBI Genome Annotation). NCF1 gene product can produce a burst of superoxide which is delivered to the lumen of the neutrophil phagosome. Mutations in NCF1, as well as in other NADPH oxidase subunits, can result in chronic granulomatous disease.

[0201] CPS 116 also aligns with LOC220830 and LOC256379 with 95-99% sequence identity. Both genes reside in genomic locus NT_{—}007758 on chromosome 7. Both genes encode proteins similar to neutrophil cytosolic factor 1 (47 kD, chronic granulomatous disease, autosomal 1).

[0202] CPS 117 corresponds to KIAA1113 (TRIM33) which encodes tripartite motif-containing 33. This gene has LocusID: 51592, and is located on chromosome 1 with reported cytogenetic location 1p13.1. The gene resides in genomic locus NT_{—}019273 (NCBI Genome Annotation). The protein encoded by this gene is thought to be a transcriptional corepressor. The protein is a member of the tripartite motif family. The tripartite motif includes three zinc-binding domains, a RING, a B-box type 1 and a B-box type 2, and a coiled-coil region. At least three alternatively spliced transcript variants for this gene have been described.

[0203] CPS 118 corresponds to DKFZP566H073 which encodes DKFZP566H073 protein. This gene has LocusID: 26001, and is located on chromosome 17 with reported cytogenetic location 17p13.3. The gene resides in genomic locus NT_{—}033299 (NCBI Genome Annotation). The gene product contains a C3HC4 type (RING) zinc finger, and can mediate protein-protein interactions.

[0204] CPS 119 corresponds to ATP2B1 which encodes ATPase, Ca++ transporting, plasma membrane 1. This gene has LocusID: 490, and is located on chromosome 12 with reported cytogenetic location 12q21-q23. The gene resides in genomic locus NT_{—}009729 (NCBI Genome Annotation).

[0205] Nucleotides 305 to 338 of CPS 119 align with an intron sequence of FLJ14075 with 100% sequence identity. FLJ14075 encodes hypothetical protein FLJ14075, and has LocusID: 79954 with reported cytogenetic location 2p25.1.

[0206] CPS 120 corresponds to IFITM2 which encodes interferon induced transmembrane protein 2 (1-8D). This gene has LocusID: 10581, and is located on chromosome 11 with reported cytogenetic location 11p15.5. The gene resides in genomic locus NT_{—}009407 (NCBI Genome Annotation). The expression of this gene can be induced by interferon.

[0207] CPS 121 corresponds to MNDA which encodes myeloid cell nuclear differentiation antigen. This gene has LocusID: 4332, and is located on chromosome 1 with reported cytogenetic location 1q22. The gene resides in genomic locus NT_{—}004982 (NCBI Genome Annotation). The myeloid cell nuclear differentiation antigen can be detected in nuclei of cells of the granulocyte-monocyte lineage. A 200-amino acid region of the protein is similar to a region in the proteins encoded by a family of interferon-inducible mouse genes, designated Ifi-201, Ifi-202, and Ifi-203. The MNDA mRNA, which contains an interferon-stimulated response element in the 5-prime untranslated region, can be upregulated in human monocytes exposed to interferon alpha. MNDA is located within 2,200 kb of FCER1A, APCS, CRP, and SPTA1. In its pattern of expression or regulation, MNDA resembles IFI16, suggesting that these genes participate in blood cell-specific responses to interferons.

[0208] CPS 122 corresponds to BTN3A2 which encodes butyrophilin, subfamily 3, member A2. This gene has LocusID: 11118, and is located on chromosome 6 with reported cytogenetic location 6p22.1. The gene resides in genomic locus NT_{—}007592 (NCBI Genome Annotation).

[0209] Nucleotides 213 to 250 of CPS 122 align with BTN3A3 and BTN3A1 with 94% and 97% sequence identity, respectively. BTN3A3 encodes butyrophilin, subfamily 3, member A3, and has LocusID: 10384. BTN3A1 encodes butyrophilin, subfamily 3, member A1, and has LocusID: 11119. Both genes are located at chromosome 6p22.1.

[0210] CPS 123 corresponds to KIAA0776 which encodes KIAA0776 protein. This gene has LocusID: 23376, and is located on chromosome 6 with reported cytogenetic location 6q16.3. The gene resides in genomic locus NT_{—}019424 (NCBI Genome Annotation).

[0211] CPS 124 corresponds to D6S2245E (HSD17B8) which encodes hydroxysteroid (17-beta) dehydrogenase 8. This gene has LocusID: 7923, and is located on chromosome 6 with reported cytogenetic location 6p21.3. The gene resides in genomic locus NT_{—}007592 (NCBI Genome Annotation). The protein encoded by this gene is similar to mouse Ke6 and is a member of the short-chain dehydrogenase superfamily. An alternatively spliced transcript of this gene has been detected.

[0212] CPS 125 corresponds to KIAA0628. This gene has LocusID: 9831, and is located on chromosome 8 with reported cytogenetic location 8q24.3. The gene resides in genomic locus NT_{—}023684 (NCBI Genome Annotation). CPS 125 is in the 3′ UTR of the gene.

[0213] CPS 126 corresponds to SELL which encodes selectin L (lymphocyte adhesion molecule 1). This gene has LocusID: 6402, and is located on chromosome 1 with reported cytogenetic location 1q23-q25. The gene resides in genomic locus NT_{—}034405 (NCBI Genome Annotation). Selectin L is a cell surface component that is a member of a family of adhesion/homing receptors which are involved in leukocyte-endothelial cell interactions. Selectin L is composed of multiple domains including one domain homologous to lectins, one to epidermal growth factor, and two to the consensus repeat units found in C3/C4 binding proteins. The protein can attach lymphocytes to lymph node high endothelial venules.

[0214] CPS 127 corresponds to MPV17 which encodes MpV17 transgene, murine homolog, glomerulosclerosis. This gene has LocusID: 4358, and is located on chromosome 2 with reported cytogenetic location 2p23-p21. The gene resides in genomic locus NT_{—}005204 (NCBI Genome Annotation). The gene product is similar to murine Mpv17. It is a predicted membrane protein and may be associated with nephrotic syndrome.

[0215] CPS 128 corresponds to FABP5 which encodes fatty acid binding protein 5 (psoriasis-associated). This gene has LocusID: 2171, and is located on chromosome 8 with reported cytogenetic location 8q21.13. The gene resides in genomic locus NT_{—}007972 (NCBI Genome Annotation). The gene product can be found in epidermal cells, and was identified as being upregulated in psoriasis tissue. Fatty acid binding proteins (FABPs) are a family of small, conserved, cytoplasmic proteins that bind long-chain fatty acids and other hydrophobic ligands. It is thought that FABPs roles include fatty acid uptake, transport, and metabolism.

[0216] Nucleotides 1 to 260 of CPS 128 have 100% sequence identity with an intron sequence of STX3A. STX3A encodes syntaxin 3A, and has LocusID: 6809 with reported cytogenetic location 11q12.3. STX3A resides in genomic locus NT_{—}033903. The alignment between CPS 128 and STX3A is in the non-protein-coding of the gene. Nucleotides 1 to 260 of CPS 128, or fragments thereof, also align to various regions on chromosomes 7, 13 and 15 with 95-97% sequence identity. In addition, nucleotides 1-260 of CPS 128, or fragments thereof, align to various region on chromosomes 2, 4, 13, 15 and 22 with sequence identity 88-93%.

[0217] CPS 129 corresponds to CASP1 which encodes caspase 1, apoptosis-related cysteine protease (interleukin 1, beta, convertase). This gene has LocusID: 834, and is located on chromosome 11 with reported cytogenetic location 11q23. The gene resides in genomic locus NT_{—}009151 (NCBI Genome Annotation). The gene product is a member of the cysteine-aspartic acid protease (caspase) family. Sequential activation of caspases plays a central role in the execution-phase of cell apoptosis. Caspases exist as inactive proenzymes which undergo proteolytic processing at conserved aspartic residues to produce 2 subunits, large and small, that dimerize to form the active enzyme. The CASP1 gene product can proteolytically cleave and activate the inactive precursor of interlukin-1, a cytokine involved in the processes such as inflammation, septic shock, and wound healing. CASP1 gene has been shown to induce cell apoptosis and may function in various developmental stages. It may have a role in the pathogenesis of Huntington disease. Alternative splicing of this gene results in at least five transcript variants encoding distinct isoforms.

[0218] Nucleotides 1 to 487 of CPS 129, or fragments thereof, aligns with various chromosome 11 regions with sequence identity 86-95%. These regions include LOC120332 and LOC160131, both of which have reported cytogenetic location 11q22.3 and encode proteins similar to caspase 1, isoform beta precursor (interleukin 1-beta convertase) (interleukin 1-B converting enzyme) (IL1B-convertase).

[0219] CPS 130 corresponds to PTPN6 which encodes protein tyrosine phosphatase, non-receptor type 6. This gene has LocusID: 5777, and is located on chromosome 12 with reported cytogenetic location 12 p13. The gene resides in genomic locus NT_{—}035206 (NCBI Genome Annotation). The protein encoded by this gene is a member of the protein tyrosine phosphatase (PTP) family. PTPs are known to be signaling molecules that regulate a variety of cellular processes including cell growth, differentiation, mitotic cycle, and oncogenic transformation. N-terminal part of PTPN6 gene product contains two tandem Src homolog (SH2) domains, which act as protein phospho-tyrosine binding domains and mediate the interaction of the gene product with its substrates. PTPN6 gene product can be expressed in hematopoietic cells, and may function as a regulator of multiple signaling pathways in hematopoietic cells. The gene product has been shown to interact with, and dephosphorylate a wide spectrum of phospho-proteins involved in hematopoietic cell signaling. At least three alternatively spliced variants of this gene, which encode distinct isoforms, have been reported.

[0220] CPS 130 also aligns with a chromosomal region near REA with at least 98% sequence identity. REA encodes repressor of estrogen receptor activity. It has LocusID: 11331 and reported cytogenetic location 12p13.

[0221] CPS 131 corresponds to SKAP-HOM (SCAP2) which encodes src family associated phosphoprotein 2. This gene has LocusID: 8935, and is located on chromosome 7 with reported cytogenetic location 7p21-p15. The gene resides in genomic locus NT_{—}007819 (NCBI Genome Annotation). The protein encoded by this gene belongs to the src family kinases. The encoded protein is similar to the src family associated phosphoprotein 1 and may function as an adaptor protein. The encoded protein has coiled-coil and SH3 domains, and is thought to play a role in the src signaling pathway in various cells. In a mouse study the SCAP2 gene is implicated in the processes of myeloid differentiation and growth arrest.

[0222] CPS 133 corresponds to GRO2 which encodes GRO2 oncogene. This gene has LocusID: 2920, and is located on chromosome 4 with reported cytogenetic location 4q21. The gene resides in genomic locus NT_{—}006216 (NCBI Genome Annotation). GRO2 is similar to GRO1. The gene product is a chemotactic agent for polymorphonuclear leukocytes.

[0223] CPS 133 also aligns with GRO1 with 85% sequence identity. GRO1 encodes GRO1 oncogene (melanoma growth stimulating activity, alpha), and has LocusID: 2919 with reported cytogenetic location 4q21. The gene resides in genomic locus NT_{—}006216.

[0224] CPS 134 corresponds to RRAS which encodes related RAS viral (r-ras) oncogene homolog. This gene has LocusID: 6237, and is located on chromosome 19 with reported cytogenetic location 19q13.3-qter. The gene resides in genomic locus NT_{—}011109 (NCBI Genome Annotation). The gene product is a member of the ras family of GTP binding proteins.

[0225] CPS 135 corresponds to KIAA0022 which encodes KIAA0022 gene product. This gene has LocusID: 9936, and is located on chromosome 2 with reported cytogenetic location 2q24.2. The gene resides in genomic locus NT_{—}005151 (NCBI Genome Annotation).

[0226] CPS 136 corresponds to FLII which encodes flightless I homolog (Drosophila). This gene has LocusID: 2314, and is located on chromosome 17 with reported cytogenetic location 17 p11.2. The gene resides in genomic locus NT_{—}030843 (NCBI Genome Annotation). The gene product is a homolog of Drosophila flightless I. It has a gelsolin-like actin-binding domain and a leucine-rich interaction domain.

[0227] CPS 137 corresponds to PRF1 which encodes perforin 1 (pore forming protein). This gene has LocusID: 5551, and is located on chromosome 10 with reported cytogenetic location 10q22. The gene resides in genomic locus NT_{—}024037 (NCBI Genome Annotation). Perforin is a cytolytic, channel-forming protein which plays a role in clearing virally infected host cells and tumor cells.

[0228] CPS 138 corresponds to KIAA0102 which encodes KIAAO102 gene product. This gene has LocusID: 9789, and is located on chromosome 11 with reported cytogenetic location 11q13.3. The gene resides in genomic locus NT_{—}033927 (NCBI Genome Annotation).

[0229] CPS 138 also aligns with a chromosomal region near PTAFR with 99% sequence identity. PTAFR encodes platelet-activating factor receptor, and has LocusID: 5724 and reported cytogenetic location 1p35-p34.3. It resides in genomic locus NT_{—}028053. Platelet-activating factor receptor is a G protein-coupled receptor.

[0230] In addition, CPS 138 has 86-94% sequence identity with various regions in chromosomes 5, 10, 11 and 15. For instance, CPS 138 aligns with a chromosome 15 region with 94% sequence identity. The chromosome 15 region includes LOC255320 which encodes a protein similar to microsomal signal peptidase 25 kDa subunit (SPase 25 kDa subunit) (SPC25).

[0231] CPS 139 corresponds to UNK_AA176780 (HSA249128) which encodes DIPB protein. This gene has LocusID: 54765, and is located on chromosome 11 with reported cytogenetic location 11p11.2. The gene resides in genomic locus NT_{—}009237 (NCBI Genome Annotation). The gene product is member of the B-box zinc finger family, and contains a region of low similarity to a region of murine Mid2. CPS 139 aligns with the region 3′ to the protein-coding strand of UNK_AA176780.

[0232] CPS 140 corresponds to PYGL which encodes phosphorylase, glycogen; liver (Hers disease, glycogen storage disease type VI). This gene has LocusID: 5836, and is located on chromosome 14 with reported cytogenetic location 14q21-q22. The gene resides in genomic locus NT_{—}025892 (NCBI Genome Annotation).

[0233] CPS 141 corresponds to DBP which encodes D site of albumin promoter (albumin D-box) binding protein. This gene has LocusID: 1628, and is located on chromosome 19 with reported cytogenetic location 19q13.3. The gene resides in genomic locus NT_{—}011109 (NCBI Genome Annotation). Albumin D-site-binding protein is a transcription factor which may play a role in the diurnal regulation of liver-specific genes. It is a member of the PAR (proline and acidic amino acid-rich) b/ZIP family.

[0234] CPS 143 corresponds to RANBP2L1 which encodes RAN binding protein 2-like 1. This gene has LocusID: 84220, and is located on chromosome 2 with reported cytogenetic location 2412.3. The gene resides in genomic locus NT_{—}022135 (NCBI Genome Annotation). RAN is a small GTP-binding protein of the RAS superfamily that is associated with the nuclear membrane and is thought to control a variety of cellular functions through its interactions with other proteins. RANBP2L1 gene shares sequence similarity with RANBP2, a large RAN-binding protein localized at the cytoplasmic side of the nuclear pore complex. It is believed that this RANBP2 gene family member arose from a duplication event 3 Mb distal to RANBP2. Alternative splicing has been observed for this locus and two variants are described. Additional splicing is suggested.

[0235] CPS 143 also aligns with LOC220692 with 100% sequence identity. LOC220692 encodes protein similar to RAN-binding protein 2-like 1, isoform 1 (sperm membrane protein BS-63). The gene is located at chromosome 2q12.3 and resides in genomic locus NT_{—}022135 (NCBI Genome Annotation).

[0236] In addition, CPS 143 has 94-96% sequence identity with KIAA0336, a chromosomal region near LOC256197, and an intron of LOC150821. KIAA0336 encodes KIAA0336 gene product, and has LocusID: 9648 and reported cytogenetic location 2q12.2. LOC256197 encodes a protein similar to ribosomal protein L22, and is located on chromosome 2. LOC150821 encodes a protein similar to KIAA0336 gene product, and is located at chromosome 2p 11.1.

[0237] CPS 144 corresponds to TNFSF10 which encodes tumor necrosis factor (ligand) superfamily, member 10. This gene has LocusID: 8743, and is located on chromosome 3 with reported cytogenetic location 3q26. The gene resides in genomic locus NT_{—}025667 (NCBI Genome Annotation). Tumor necrosis factor (TNF) family cytokines function as mediators of immune regulation and the inflammatory response. TNFSF10 gene product is a Type II glycoprotein of the tumor necrosis factor ligand superfamily, and can mediate cell death.

[0238] CPS 145 corresponds to KIAA0854 which encodes KIAA0854 protein. This gene has LocusID: 22882, and is located on chromosome 8 with reported cytogenetic location 8q24.13. The gene resides in genomic locus NT_{—}023663 (NCBI Genome Annotation).

[0239] CPS 146 corresponds to SDS which encodes serine dehydratase. This gene has LocusID: 10993, and is located on chromosome 12 with reported cytogenetic location 12q24.12. The gene resides in genomic locus NT_{—}009601 (NCBI Genome Annotation). Serine dehydratase catalyzes the PLP-dependent alpha,beta-elimination of L-serine to pyruvate and ammonia. It is one of three enzymes that are regarded as metabolic exits of the serine-glycine pool. Serine dehydratase can be found in the liver.

[0240] CPS 147 corresponds to KIAA0576 (COASTER) which encodes coactivator for steroid receptors. This gene has LocusID: 26036, and is located on chromosome 6 with reported cytogenetic location 6p1.1. The gene resides in genomic locus NT_{—}007592 (NCBI Genome Annotation).

[0241] Affymetrix annotation suggests that CPS 148 corresponds to FCGR3B which encodes Fc fragment of IgG, low affinity IIIb, receptor for (CD16). The gene has LocusID: 2215, and is located at chromosome 1q23.

[0242] Blast search of the Entrez human genome sequence database shows that CPS 148 aligns with FCGR3A with at least 97% sequence identity. FCGR3A encodes Fc fragment of IgG, low affinity IIIa, receptor for (CD16). The gene has LocusID: 2214, and is located on chromosome 1 with reported cytogenetic location 1q23. The gene resides in genomic locus NT_{—}004668 (NCBI Genome Annotation). The gene product is a Type III Fc gamma receptor and a member of the immunoglobulin superfamily. It can associate with zeta chain of the T-cell receptor complex (CD3Z).

[0243] CPS 149 corresponds to FCER1A which encodes Fc fragment of IgE, high affinity I, receptor for; alpha polypeptide. The gene product is the alpha subunit of the high affinity IgE receptor, and may be involved in triggering allergic responses. This gene has LocusID: 2205, and is located on chromosome 1 with reported cytogenetic location 1q23. The gene resides in genomic locus NT_{—}004982 (NCBI Genome Annotation). The IgE receptor contains 3 subunits: alpha, beta (MIM 147138), and gamma (MIM 147139). The alpha subunit can be glycosylated.

[0244] CPS 150 corresponds to CD44 which encodes CD44 antigen (homing function and Indian blood group system). This gene has LocusID: 960, and is located on chromosome 11 with reported cytogenetic location 11 p13. The gene resides in genomic locus NT_{—}009237 (NCBI Genome Annotation).

[0245] CPS 151 corresponds to ID1 which encodes inhibitor of DNA binding 1, dominant negative helix-loop-helix protein. This gene has LocusID: 3397, and is located on chromosome 20 with reported cytogenetic location 20q11. The gene resides in genomic locus NT_{—}028392 (NCBI Genome Annotation). The gene product is a member of the Id helix-loop-helix family of proteins, and may negatively regulate cell differentiation.

[0246] Blast search of the Entrez human genome sequence database shows that CPS 152 overlaps KIAA0963. CPS 152 aligns with the non-protein-coding strand of KIAA0963. KIAA0963 encodes KIAA0963 protein, and has LocusID: 22904 with reported cytogenetic location 19p13.3. KIAA0963 resides in genomic locus NT_{—}011277 (NCBI Genome Annotation).

[0247] CPS 153 corresponds to ADTB2 (AP2B1) which encodes adaptor-related protein complex 2, beta 1 subunit. This gene has LocusID: 163, and is located on chromosome 17 with reported cytogenetic location 17q11.2-q12. The gene resides in genomic locus NT_{—}010799 (NCBI Genome Annotation). The beta adaptin subunit is part of the clathrin coat assembly complex which links clathrin to receptors in coated pits and vesicles. These vesicles are involved in endocytosis and Golgi processing. The beta 1 subunit is one of the assembly proteins which binds to clathrin and initiates coat formation.

[0248] CPS 154 corresponds to MADH3 which encodes MAD, mothers against decapentaplegic homolog 3 (Drosophila). This gene has LocusID: 4088, and is located on chromosome 15 with reported cytogenetic location 15q21-q22. The gene resides in genomic locus NT_{—}010265 (NCBI Genome Annotation). The gene product is similar to murine Madh3. It is a member of the Smad family of proteins, and may affect transcription in response to TGF-beta signaling pathways.

[0249] CPS 155 corresponds to ARPCIB which encodes actin related protein 2/3 complex, subunit 1B (41 kD). This gene has LocusID: 10095, and is located on chromosome 7 with reported cytogenetic location 7q11.21. The gene resides in genomic locus NT_{—}007933 (NCBI Genome Annotation). The gene product is involved in assembly of the actin cytoskeleton, and may have a role in protrusion of lamellipodia.

[0250] CPS 155 also aligns with two chromosome 12 regions with 99-100% sequence identity. These two regions reside in genomic locus NT_{—}035283 (NCBI Genome Annotation). The first region is located near LOC196489 which encodes a protein similar to FLJ00209 protein. The second region is located near LOC144584 which encodes a protein similar to vacuolar protein sorting 35 (yeast); maternal-embryonic 3. Both LOC196489 and LOC144584 have reported cytogenetic location 12q13.12.

[0251] Affymetrix annotation suggests that CPS 156 corresponds to TALDO 1 which encodes transaldolase 1 and has LocusID: 6888. The gene is located at chromosome 11p15.5-p15.4.

[0252] CPS 157 corresponds to UNK_AL035079 (CAT) which encodes catalase. This gene has LocusID: 847, and is located on chromosome 11 with reported cytogenetic location 11p13. The gene resides in genomic locus NT_{—}009237 (NCBI Genome Annotation). Catalase is a tetrameric hemoprotein that can detoxify hydrogen peroxide.

[0253] CPS 158 corresponds to STXBP1 which encodes syntaxin binding protein 1. This gene has LocusID: 6812, and is located on chromosome 9 with reported cytogenetic location 9q34.1. The gene resides in genomic locus NT_{—}029366 (NCBI Genome Annotation).

[0254] CPS 159 corresponds to UNG2 which encodes uracil-DNA glycosylase 2. This gene has LocusID: 10309, and is located on chromosome 5 with reported cytogenetic location 5p15.2-p13.1. The gene resides in genomic locus NT_{—}006431 (NCBI Genome Annotation). Uracil-DNA glycosylase 2 possesses uracil-DNA glycosylase activity.

[0255] CPS 160 corresponds to DUSP5 which encodes dual specificity phosphatase 5. This gene has LocusID: 1847, and is located on chromosome 10 with reported cytogenetic location 10q25. The gene resides in genomic locus NT_{—}030059 (NCBI Genome Annotation). The protein encoded by DUSP5 gene is a member of the dual specificity protein phosphatase subfamily. These phosphatases can inactivate their target kinases by dephosphorylating both the phosphoserine/threonine and phosphotyrosine residues. They can negatively regulate members of the mitogen-activated protein (MAP) kinase superfamily (MAPK/ERK, SAPK/JNK, p38), which are associated with cellular proliferation and differentiation. Different members of the family of dual specificity phosphatases show distinct substrate specificities for various MAP kinases, different tissue distribution and subcellular localization, and different modes of inducibility of their expression by extracellular stimuli. DUSP5 gene product can inactivate ERK1, and is expressed in a variety of tissues including pancreas and brain.

[0256] CPS 161 corresponds to PTPRO which encodes protein tyrosine phosphatase, receptor type, O. This gene has LocusID: 5800, and is located on chromosome 12 with reported cytogenetic location 12p13.3-p13.2. The gene resides in genomic locus NT_{—}009714 (NCBI Genome Annotation). The gene product is an integral membrane protein containing a transmembrane domain and an intracellular catalytic domain with a characteristic signature motif. Several alternatively spliced transcript variants, some of which encode different isoforms of the protein, have been described. The gene product also contains fibronectin type III-like repeats and putative glycosylation sites in the extracellular domain.

[0257] Affymetrix annotation suggests that CPS 162 corresponds to SLA which encodes Src-like-adaptor and has LocusID: 6503. The gene has reported cytogenetic location at chromosome 8q24.

[0258] Blast search of the Entrez human genome sequence database shows that CPS 162 aligns with an intron sequence of TG with at least 99% sequence identity. TG encodes thyroglobulin, and has LocusID: 7038 with reported cytogenetic location 8q24.2-q24.3. The gene resides in genomic locus NT_{—}008150 (NCBI Genome Annotation). CPS 162 matches with the non-protein-coding strand of TG. Thyroglobulin is a precursor of thyroid hormones.

[0259] CPS 163 corresponds to RFP2 which encodes ret finger protein 2. This gene has LocusID: 10206, and is located on chromosome 13 with reported cytogenetic location 13q14. The gene resides in genomic locus NT_{—}033922 (NCBI Genome Annotation). The protein encoded by RFP2 gene is a member of the tripartite motif (TRIM) family. The TRIM motif includes three zinc-binding domains, a RING, a B-box type 1 and a B-box type 2, and a coiled-coil region. The RFP2 gene product localizes to cytoplasmic bodies near the nucleus. The gene is located on chromosome 13 within the minimal deletion region for B-cell chronic lymphocytic leukemia. Alternative splicing of this gene has been described.

[0260] Nucleotides 3 to 255 of CPS 163 have 83% sequence identity with a chromosomal region near LOC162162. LOC162162 encodes a protein similar to spinocerebellar ataxia type 1, and has reported cytogenetic location 16q23.1.

[0261] CPS 164 corresponds to ADFP which encodes adipose differentiation-related protein (adipophilin). This gene has LocusID: 123, and is located on chromosome 9 with reported cytogenetic location 9p21.2. The gene resides in genomic locus NT_{—}023974 (NCBI Genome Annotation). Adipocyte differentiation-related protein is associated with the globule surface membrane material. The protein is a major constituent of the globule surface. Increase in mRNA levels is one of the earliest indications of adipocyte differentiation. The product is also a component of milk lipid globules.

[0262] CPS 164 aligns with a chromosome 1 region near LOC254424 with 94% sequence identity. LOC254424 encodes a protein similar to adipophilin (adipose differentiation-related protein) (ADRP).

[0263] CPS 165 corresponds to ADTD (AP3D1) which encodes adaptor-related protein complex 3, delta 1 subunit. This gene has LocusID: 8943, and is located on chromosome 19 with reported cytogenetic location 19p13.3. The gene resides in genomic locus NT_{—}011268 (NCBI Genome Annotation). Delta-adaptin is a component of the AP-3 complex which is involved in intracellular transport.

[0264] Affymetrix annotation suggests that CPS 166 corresponds to ADTG which is also known as AP101. The gene encodes adaptor-related protein complex 1, gamma 1 subunit. The gene has LocusID: 164, and is located at chromosome 16q23.

[0265] Blast search of the Entrez human genome sequence database shows that CPS 166 aligns to LOC255980 with at least 99% sequence identity. LOC255980 encodes a protein similar to hypothetical protein FLJ20151, and is located on chromosome 15. LOC255980 resides in genomic locus NT_{—}010265. It overlaps FLJ20151 which has LocusID: 54837 and reported cytogenetic location 15q21.3.

[0266] CPS 168 corresponds to UNK_X87344 (PSMB8) Which encodes proteasome (prosome, macropain) subunit, beta type, 8 (large multifunctional protease 7). This gene has LocusID: 5696, and is located on chromosome 6 with reported cytogenetic location 6p21.3. The gene resides in genomic locus NT_{—}007592 (NCBI Genome Annotation). Beta subunit 8 of the proteasome (prosome macropain) can replace beta subunit PSMB5 when cells are stimulated by interferon gamma, thereby altering proteasome specificity.

[0267] CPS 170 corresponds to CAPG which encodes capping protein (actin filament), gelsolin-like. This gene has LocusID: 822, and is located on chromosome 2 with reported cytogenetic location 2cen-q24. The gene resides in genomic locus NT_{—}015805 (NCBI Genome Annotation). The gene product is a macrophage capping protein. It can reversibly block the barbed ends. The gene product is a member of the gelsolin/villin protein family.

[0268] CPS 171 corresponds to ARL7 which encodes ADP-ribosylation factor-like 7. This gene has LocusID: 10123, and is located on chromosome 2 with reported cytogenetic location 2q37.2. The gene resides in genomic locus NT_{—}005414 (NCBI Genome Annotation). ADP-ribosylation factor-like 7 (ARL7) is a member of the ADP-ribosylation factor family of GTP-binding proteins. ARL7 is similar to ARL4 and ARL6, and each has a nuclear localization signal and a high guanine nucleotide exchange rate.

[0269] CPS 172 corresponds to RCV1 which encodes recoverin. This gene has LocusID: 5957, and is located on chromosome 17 with reported cytogenetic location 17p13.1. The gene resides in genomic locus NT_{—}010718 (NCBI Genome Annotation). Recoverin is a calcium-binding protein which can activate guanylate cyclase activity.

[0270] CPS 173 corresponds to GRO3 which encodes GRO3 oncogene. This gene has LocusID: 2921, and is located on chromosome 4 with reported cytogenetic location 4q21. The gene resides in genomic locus NT_{—}006216 (NCBI Genome Annotation). GRO3 is similar to human GRO 1, and may encode a mitogenic factor.

[0271] CPS 175 corresponds to UNK_AF070606 (ATP2B 1) which encodes ATPase, Ca++ transporting, plasma membrane 1. This gene has LocusID: 490, and is located on chromosome 12 with reported cytogenetic location 12q21-q23. The gene resides in genomic locus NT_{—}009729 (NCBI Genome Annotation). CPS 175 aligns with the 3′ UTR of the protein-coding strand of the gene.

[0272] CPS 176 corresponds to AOAH which encodes acyloxyacyl hydrolase (neutrophil). This gene has LocusID: 313, and is located on chromosome 7 with reported cytogenetic location 7 p14-p12. The gene resides in genomic locus NT_{—}007819 (NCBI Genome Annotation). Acyloxyacyl hydrolase is a 2-subunit lipase which can hydrolyze the secondary (acyloxyacyl-linked) fatty acyl chains from the lipid A region of bacterial endotoxins. Acyloxyacyl hydrolase may modulate host inflammatory responses to gram-negative bacterial invasion. The 2 subunits are encoded by a single mRNA.

[0273] CPS 177 corresponds to UNK_AJ224442 (WBSCR22) which encodes Williams Beuren syndrome chromosome region 22. This gene has LocusID: 114049, and is located on chromosome 7. The gene resides in genomic locus NT_{—}007758 (NCBI Genome Annotation).

[0274] CPS 178 corresponds to MSR1 which encodes macrophage scavenger receptor 1. This gene has LocusID: 4481, and is located on chromosome 8 with reported cytogenetic location 8p22. The gene resides in genomic locus NT_{—}015280 (NCBI Genome Annotation). This gene encodes the class A macrophage scavenger receptors, which include at least three different types (1, 2, 3) generated by alternative splicing of this gene. These receptors or isoforms are macrophage-specific trimeric integral membrane glycoproteins and have been implicated in many macrophage-associated physiological and pathological processes including atherosclerosis, Alzheimer's disease, and host defense. The isoforms type 1 and type 2 are functional receptors and are able to mediate the endocytosis of modified low density lipoproteins (LDLs). The isoform type 3 may have an altered intracellular processing and can be trapped within the endoplasmic reticulum. The isoform type 3 can inhibit the function of isoforms type 1 and type 2 when co-expressed, indicating a dominant negative effect and suggesting a mechanism for regulation of scavenger receptor activity in macrophages.

[0275] CPS 179 corresponds to XAP4 (C20orf18) which encodes chromosome 20 open reading frame 18. This gene has LocusID: 10616, and is located on chromosome 20 with reported cytogenetic location 20p13. The gene resides in genomic locus NT_{—}011387 (NCBI Genome Annotation). The gene contains at least 12 exons. Several alternatively spliced transcript variants have been described. The gene product is similar to mouse UIP28/UbcM4 interacting protein at the amino acid level, and contains a C3HC4 type (RING) zinc finger. It may interact with PKC and mediate protein-protein interactions.

[0276] CPS 180 corresponds to C1QR1 which encodes complement component 1, q subcomponent, receptor 1. This gene has LocusID: 22918, and is located on chromosome 20 with reported cytogenetic location 20p11.21. The gene resides in genomic locus NT_{—}011387 (NCBI Genome Annotation). The gene product is a type I membrane protein and can act as a receptor for complement protein C1q, mannose-binding lectin, and pulmonary surfactant protein A. The gene product is a functional receptor involved in ligand-mediated enhancement of phagocytosis.

[0277] CPS 181 corresponds to STAT4 which encodes signal transducer and activator of transcription 4. This gene has LocusID: 6775, and is located on chromosome 2 with reported cytogenetic location 2q32.2-q32.3. The gene resides in genomic locus NT_{—}022197 (NCBI Genome Annotation). The gene product is a member of the STAT family of transcription factors. In response to cytokines and growth factors, STAT family members may be phosphorylated by the receptor associated kinases, and then form homo- or heterodimers that translocate to the cell nucleus where they act as transcription activators. STAT4 gene product may be involved in mediating responses to IL12 in lymphocytes and regulating the differentiation of T helper cells.

[0278] CPS 182 corresponds to UNK_AL049309 (SFRS12) which encodes splicing factor, arginine/serine-rich 12. This gene has LocusID: 140890, and is located on chromosome 5 with reported cytogenetic location 5q12.3. The gene resides in genomic locus NT_{—}006431 (NCBI Genome Annotation).

[0279] CPS 183 corresponds to RNASE2 which encodes ribonuclease, RNase A family, 2 (liver, eosinophil-derived neurotoxin). This gene has LocusID: 6036, and is located on chromosome 14 with reported cytogenetic location 14q24-q31. The gene resides in genomic locus NT_{—}025892 (NCBI Genome Annotation). The gene product is a member of ribonuclease superfamily, and has neurotoxic and ribonuclease activities.

[0280] CPS 183 also aligns with LOC122661 and RNASE3 with about 86-93% sequence identity. LOC122661 encodes a protein similar to nonsecretory ribonuclease precursor (Ribonuclease US) (Eosinophil-derived neurotoxin) (RNase UpI-2) (Ribonuclease 2) (RNase 2). It is located at chromosome 14q11.1, and resides in genomic locus NT_{—}025892. RNASE3 encodes ribonuclease, RNase A family, 3 (eosinophil cationic protein). RNASE3 has LocusID: 6037 and reported cytogenetic location 14q24-q31. It also resides in genomic locus NT_{—}025892. RNASE3 gene product is a member of the ribonuclease superfamily, and has both neurotoxic and ribonuclease activities.

[0281] CPS 184 corresponds to NCF4 which encodes neutrophil cytosolic factor 4 (40 kD). This gene has LocusID: 4689, and is located on chromosome 22 with reported cytogenetic location 22q13.1. The gene resides in genomic locus NT_{—}011520 (NCBI Genome Annotation). The protein encoded by this gene is a cytosolic element of nicotinamide adenine dinucleotide phosphate-oxidase. Upon neutrophil stimulation, the encoded protein and other cytosolic elements are sent to the cell membrane from the cytosol to form a complex which produces phagocytic oxygen radicals. Two motifs found in this protein, an SH3 domain and a PC motif, are significant to protein-protein interactions. Through interaction with the SH3 domain, NCF4 gene product is responsible for the downregulation of NADPH-oxidase. Alternative splicing has been observed in this gene. CPS 184 aligns to the 3′ UTR of the gene.

[0282] CPS 185 corresponds to ANXA4 which encodes annexin A4. This gene has LocusID: 307, and is located on chromosome 2 with reported cytogenetic location 2p13. The gene resides in genomic locus NT_{—}022184 (NCBI Genome Annotation). Annexin A4 belongs to the annexin family of calcium-dependent phospholipid binding proteins. Several members of the annexin family have been implicated in membrane-related events along exocytotic and endocytotic pathways. Annexin A4 may interact with ATP, have in vitro anticoagulant activity, and inhibit phospholipase A2 activity. Annexin A4 can be detected in epithelial cells.

[0283] CPS 186 corresponds to ME2 which encodes malic enzyme 2, NAD(+)-dependent, mitochondrial. This gene has LocusID: 4200, and is located on chromosome 18 with reported cytogenetic location 18q21. The gene resides in genomic locus NT_{—}033905 (NCBI Genome Annotation). The gene product is a homotetrameric protein which can catalyze the oxidative decarboxylation of malate to pyruvate.

[0284] CPS 183 also has 91% sequence identity with a chromosome 9 region near LOC169570. LOC169570 has reported cytogenetic location 9 p13.1.

[0285] CPS 187 corresponds to IF135 which encodes interferon-induced protein 35. This gene has LocusID: 3430, and is located on chromosome 17 with reported cytogenetic location 17q21. The gene resides in genomic locus NT_{—}035490 (NCBI Genome Annotation). Interferon-induced protein 35 associates with B-ATF transcription factor on interferon treatment. It contains a leucine-zipper motif.

[0286] CPS 188 corresponds to VAMP5 which encodes vesicle-associated membrane protein 5 (myobrevin). This gene has LocusID: 10791, and is located on chromosome 2 with reported cytogenetic location 2p11.2. The gene resides in genomic locus NT_{—}015805 (NCBI Genome Annotation). The gene product is a member of the synaptobrevin/VAMP family of proteins.

[0287] CPS 188 also has 87% sequence identity with an intron sequence of NSF. NSF encodes N-ethylmaleimide-sensitive factor. It has LocusID: 4905 and reported cytogenetic location 17q21.

[0288] CPS 189 corresponds to IMPA2 which encodes inositol(myo)-1(or 4)-monophosphatase 2. This gene has LocusID: 3613, and is located on chromosome 18 with reported cytogenetic location 18 p11.2. The gene resides in genomic locus NT_{—}010859 (NCBI Genome Annotation).

[0289] CPS 190 corresponds to GZMK which encodes granzyme K (serine protease, granzyme 3; tryptase II). This gene has LocusID: 3003, and is located on chromosome 5 with reported cytogenetic location 5q11-q12. The gene resides in genomic locus NT_{—}006431 (NCBI Genome Annotation). This gene product is a member of a group of related serine proteases from the cytoplasmic granules of cytotoxic lymphocytes. Cytolytic T lymphocytes (CTL) and natural killer (NK) cells can recognize, bind, and lyse specific target cells. They are thought to protect their host by lysing cells bearing on their surface “nonself” antigens, usually peptides or proteins resulting from infection by intracellular pathogens.

[0290] CPS 191 corresponds to BGN which encodes biglycan. This gene has LocusID: 633, and is located on chromosome X with reported cytogenetic location Xq28. The gene resides in genomic locus NT_{—}025965 (NCBI Genome Annotation). The protein encoded by this gene is a small cellular or pericellular matrix proteoglycan that is related in structure to two other small proteoglycans, decorin and fibromodulin. The encoded protein and decorin are thought to be the result of a gene duplication. Decorin contains one attached glycosaminoglycan chain, while biglycan probably contains two chains. Biglycan is thought to function in connective tissue metabolism by binding to collagen fibrils and transferring growth factor-beta. It may promote neuronal survival. This gene is a candidate gene for the Happle syndrome.

[0291] CPS 192 corresponds to AIF1 which encodes allograft inflammatory factor 1. This gene has LocusID: 199, and is located on chromosome 6 with reported cytogenetic location 6p21.3. The gene resides in genomic locus NT_{—}007592 (NCBI Genome Annotation). This gene is induced by cytokines and interferon. Its protein product is thought to be involved in negative regulation of growth of vascular smooth muscle cells, which contributes to the anti-inflammatory response to vessel wall trauma. The gene expresses at least three transcripts.

[0292] CPS 193 corresponds to CBP2 (SERPINH2) which encodes serine (or cysteine) proteinase inhibitor, clade H (heat shock protein 47), member 2. This gene has LocusID: 872, and is located on chromosome 11 with reported cytogenetic location 11q13.5. The gene resides in genomic locus NT_{—}033927 (NCBI Genome Annotation). The gene product is also known as Colligin-2, which is a collagen-binding protein that acts as a heat shock protein.

[0293] CPS 193 also has 92% sequence identity with a chromosome 9 region near pshsp47. Pshsp47 encodes serine (or cysteine) proteinase inhibitor, clade H (heat shock protein 47), member 2 pseudogene. It has LocusID: 158172 and reported cytogenetic location 9p 11.2.

[0294] Affymetrix annotation suggests that CPS 195 corresponds to IQGAP1 which encodes IQ motif containing GTPase activating protein 1. The gene has LocusID: 8826 with reported cytogenetic location 15q26.1.

[0295] Blast search of the Entrez human genome sequence database shows that nucleotides 395 to 5984 of L33075 align with IQGAP1 with 98% sequence identity. IQGAP1 encodes IQ motif containing GTPase activating protein 1. The gene has LocusID: 8826, and is located on chromosome 15 with reported cytogenetic location 15q26.1. The gene resides in genomic locus NT_{—}033276. The gene product contains a GTPase activating domain and multiple calmodulin binding domains, and can bind to actin cytoskeleton and inhibit GTPase activity of ras family of GTP binding proteins Cdc42Hs and rac.

[0296] CPS 196 corresponds to KIAA0823 (PPP1R16B) which encodes protein phosphatase 1, regulatory (inhibitor) subunit 16B. This gene has LocusID: 26051, and is located on chromosome 20 with reported cytogenetic location 20q11.23. The gene resides in genomic locus NT_{—}011362 (NCBI Genome Annotation).

[0297] CPS 197 corresponds to UNK_A1018098 (MGC15523) which encodes hypothetical protein MGC15523. This gene has LocusID: 124565, and is located on chromosome 17 with reported cytogenetic location 17q25.3. The gene resides in genomic locus NT_{—}010661 (NCBI Genome Annotation).

[0298] Affymetrix annotation suggests that CPS 198 corresponds to CD163. CD163 encodes CD163 antigen, and has LocusID: 9332. The gene is located at chromosome 12p13.3.

[0299] CPS 199 corresponds to HK3 which encodes hexokinase 3 (white cell). This gene has LocusID: 3101, and is located on chromosome 5 with reported cytogenetic location 5q35.2. The gene resides in genomic locus NT_{—}023132 (NCBI Genome Annotation). Hexokinases phosphorylate glucose to produce glucose-6-phosphate, thus committing glucose to the glycolytic pathway. HK3 gene encodes hexokinase 3 which is similar to hexokinases 1 and 2. Hexokinase 3 can be inhibited by its product glucose-6-phosphate.

[0300] CPS 200 corresponds to FOS which encodes v-fos FBJ murine osteosarcoma viral oncogene homolog. This gene has LocusID: 2353, and is located on chromosome 14 with reported cytogenetic location 14q24.3. The gene resides in genomic locus NT_{—}026437 (NCBI Genome Annotation). The Fos gene family has 4 members: FOS, FOSB, FOSL1, and FOSL2. These genes encode leucine zipper proteins that can dimerize with proteins of the JUN family, thereby forming the transcription factor complex AP-1. As such, the FOS proteins have been implicated as regulators of cell proliferation, differentiation, and transformation. In some cases, expression of the FOS gene has also been associated with apoptotic cell death. FOS gene product may also be involved in alteration of DNA methylation.

[0301] CPS 201 corresponds to DIFF48 (C6orf32) which encodes chromosome 6 open reading frame 32. This gene has LocusID: 9750, and is located on chromosome 6 with reported cytogenetic location 6p22.3-p21.32. The gene resides in genomic locus NT_{—}007592 (NCBI Genome Annotation). The protein encoded by DIFF48 can stimulate the formation of a non-mitotic multinucleate syncytium from proliferative cytotrophoblasts during trophoblast differentiation. An alternatively spliced transcript variant of this gene has been described.

[0302] CPS 202 corresponds to UNK_L23134 (GZMM) which encodes granzyme M (lymphocyte met-ase 1). This gene has LocusID: 3004, and is located on chromosome 19 with reported cytogenetic location 19p13.3. The gene resides in genomic locus NT_{—}011227 (NCBI Genome Annotation). Human natural killer (NK)-cells and activated lymphocytes express and store a distinct subset of neutral serine proteases together with proteoglycans and other immune effector molecules in large cytoplasmic granules. These serine proteases are collectively termed granzymes and include at least four distinct gene products: granzyme A, granzyme B, granzyme H, and Met-ase which is also known as granzyme M.

[0303] CPS 203 corresponds to LMO2 which encodes LIM domain only 2 (rhombotin-like 1). This gene has LocusID: 4005, and is located on chromosome 11 with reported cytogenetic location 11p13. The gene resides in genomic locus NT_{—}009237 (NCBI Genome Annotation). LMO2 encodes a cysteine-rich, two LIM-domain protein that is involved in yolk sac erythropoiesis. The LMO2 protein has a role in hematopoietic development. The LMO2 transcription start site is located approximately 25 kb downstream from the 11p13 T-cell translocation cluster (11p13 ttc), where a number T-cell acute lymphoblastic leukemia-specific translocations occur. The LMO2 protein is a member of the rhombotin family.

[0304] CPS 204 corresponds to PDI2 (PADI2) which encodes peptidyl arginine deiminase, type II. This gene has LocusID: 11240, and is located on chromosome 1 with reported cytogenetic location 1p35.2-p35.1. The gene resides in genomic locus NT_{—}034376 (NCBI Genome Annotation). The gene product is similar to rat skeletal muscle peptidyl arginine deiminase, type II. It may convert arginine residues within proteins to citrulline residues.

[0305] CPS 205 corresponds to UNK_AL031282 (FLJ13052) which encodes NAD kinase. This gene has LocusID: 65220, and is located on chromosome 1 with reported cytogenetic location 1p36.33-p36.21. The gene resides in genomic locus NT_{—}004350 (NCBI Genome Annotation).

[0306] CPS 205 also aligns with a chromosomal region near MMP23B with at least 98% sequence identity. MMP23B encodes matrix metalloproteinase 23B, and has LocusID: 8510 and reported cytogenetic location 1p36.3. The gene resides in genomic locus NT_{—}004350. CPS 205 aligns with the non-protein-coding strand of MMP23B.

[0307] CPS 206 corresponds to GABRG2 which encodes gamma-aminobutyric acid (GABA) A receptor, gamma 2. This gene has LocusID: 2566, and is located on chromosome 5 with reported cytogenetic location 5q31.1-q33.1. The gene resides in genomic locus NT_{—}030698 (NCBI Genome Annotation). The gamma-aminobutyric acid (GABA) A receptor, gamma 2 is found as an inhibitory neurotransmitter receptor in the brain.

[0308] CPS 207 corresponds to KIAA0404 which encodes KIAA0404 protein. This gene has LocusID: 23130, and is located on chromosome 11 with reported cytogenetic location 11q13.1. The gene resides in genomic locus NT_{—}033241 (NCBI Genome Annotation).

[0309] CPS 208 corresponds to UNK_U12471 (THBS1) which encodes thrombospondin 1. This gene has LocusID: 7057, and is located on chromosome 15 with reported cytogenetic location 15q15. The gene resides in genomic locus NT_{—}030828 (NCBI Genome Annotation). Thrombospondin-1 has a role in blood clotting and in angiogenesis. It is a member of a family of adhesive molecules.

[0310] Affymetrix annotation suggests that CPS 209 corresponds to IGHA1 which encodes immunoglobulin heavy constant alpha 1. The gene has LocusID: 3493 and reported cytogenetic location 14q32.33.

[0311] CPS 210 corresponds to ABCB1 which encodes ATP-binding cassette, sub-family B (MDR/TAP), member 1. This gene has LocusID: 5243, and is located on chromosome 7 with reported cytogenetic location 7q21.1. The gene resides in genomic locus NT_{—}007933 (NCBI Genome Annotation). The membrane-associated protein encoded by this gene is a member of the superfamily of ATP-binding cassette (ABC) transporters. ABC proteins transport various molecules across extra- and intra-cellular membranes. ABC genes are divided into seven distinct subfamilies (ABC 1, MDR/TAP, MRP, ALD, OABP, GCN20, White). This protein encoded by ABCB 1 gene is a member of the MDR/TAP subfamily. Members of the MDR/TAP subfamily are involved in multidrug resistance. The ABCB gene product is an ATP-dependent drug efflux pump for xenobiotic compounds with broad substrate specificity. It is responsible for decreased drug accumulation in multidrug-resistant cells and often mediates the development of resistance to anticancer drugs. It can also function as a transporter in the blood-brain barrier. The ABCB gene product is also known as P glycoprotein 1.

[0312] CPS 211 corresponds to NRIPI which encodes nuclear receptor interacting protein 1. This gene has LocusID: 8204, and is located on chromosome 21 with reported cytogenetic location 21q11.2. The gene resides in genomic locus NT_{—}011512 (NCBI Genome Annotation). Nuclear receptor interacting protein 1 is a nuclear protein that can interact with the hormone-dependent activation domain AF2 of nuclear receptors. Also known as RIP140, this protein modulates transcriptional activity of the estrogen receptor.

[0313] CPS 213 corresponds to GLB1 which encodes galactosidase, beta 1. This gene has LocusID: 2720, and is located on chromosome 3 with reported cytogenetic location 3p21.33. The gene resides in genomic locus NT_{—}005580 (NCBI Genome Annotation). The gene product can catalyze cleavage of the terminal galactose.

[0314] CPS 214 corresponds to MSC which encodes musculin (activated B-cell factor-1). This gene has LocusID: 9242, and is located on chromosome 8 with reported cytogenetic location 8q21. The gene resides in genomic locus NT_{—}034895 (NCBI Genome Annotation). The gene product contains a bHLH motif, a putative nuclear localization signal, a glycine-rich region, and a stretch of acidic residues. The gene product is capable of binding an E-box element either as a homodimer or as a heterodimer with E2A in vitro, and forms heterodimers with E2A proteins in vivo. It also contains a transcriptional repression domain and is capable of inhibiting the transactivation capability of E47, an E2A protein, in mammalian cells. MSC is thought to be a downstream target of the B-cell receptor signal transduction pathway.

[0315] CPS 216 corresponds to UNK_U95006 (MGC14480) which encodes hypothetical protein MGC14480. This gene has LocusID: 201254, and is located on chromosome 17 with reported cytogenetic location 17q25.3. The gene resides in genomic locus NT_{—}035479 (NCBI Genome Annotation).

[0316] Nucleotides 400 to 561 of CPS 216 also have 84% sequence identity with an intron sequence of EGI. EGI encodes endothelial-derived gene 1, and has LocusID: 80306 and reported cytogenetic location 4p 16.

[0317] CPS 217 corresponds to NK4 which encodes natural killer cell transcript 4. This gene has LocusID: 9235, and is located on chromosome 16 with reported cytogenetic location 16p13.3. The gene resides in genomic locus NT_{—}010552 (NCBI Genome Annotation). The gene product may play a role in cell adhesion. It contains an RGD motif.

[0318] CPS 217 also has 96% sequence identity with LOC124213 which encodes a protein similar to natural killer cell transcript 4. LOC124213 is located at chromosome 16p13.11, and also resides in genomic locus NT_{—}010552.

[0319] CPS 218 corresponds to UNK_Z24724 (FLJ20986) which encodes hypothetical protein FLJ20986. This gene has LocusID: 79572, and is located on chromosome 3 with reported cytogenetic location 3q29. The gene resides in genomic locus NT_{—}005535 (NCBI Genome Annotation). The alignment between CPS 218 and UNK_Z24724 is within an intron of GP5 which encodes glycoprotein V (platelet) and has LocusID: 2814.

[0320] CPS 219 corresponds to GRN which encodes granulin. This gene has LocusID: 2896, and is located on chromosome 17 with reported cytogenetic location 17q21.32. The gene resides in genomic locus NT_{—}010755 (NCBI Genome Annotation). Granulin is a putative growth factor. It is cysteine rich and contains multiple granulin repeats.

[0321] CPS 220 corresponds to EREG which encodes epiregulin. This gene has LocusID: 2069, and is located on chromosome 4 with reported cytogenetic location 4q13.3. The gene resides in genomic locus NT_{—}006216 (NCBI Genome Annotation). Epiregulin is a member of the epidermal growth factor family. Epiregulin can function as a ligand of EGFR (epidermal growth factor receptor), as well as a ligand of most members of the ERBB (v-erb-b2 oncogene homolog) family of tyrosine-kinase receptors. Epiregulin may promote cell proliferation.

[0322] CPS 221 corresponds to KIAA0382 (ARHGEF12) which encodes Rho guanine nucleotide exchange factor (GEF) 12. This gene has LocusID: 23365, and is located on chromosome 11 with reported cytogenetic location 11q23.3. The gene resides in genomic locus NT_{—}033899 (NCBI Genome Annotation). Rho GTPases play a role in numerous cellular processes that are initiated by extracellular stimuli that work through G protein coupled receptors. Rho guanine nucleotide exchange factor (GEF) 12 may form a complex with G proteins and stimulate Rho-dependent signals. This protein is observed to form myeloid/lymphoid fusion partner in acute myeloid leukemia.

[0323] CPS 222 corresponds to RNASE6 which encodes ribonuclease, RNase A family, k6. This gene has LocusID: 6039, and is located on chromosome 14 with reported cytogenetic location 14q11.1. The gene resides in genomic locus NT_{—}025892 (NCBI Genome Annotation). Ribonuclease k6 may function in host defense. It is a member of eosinophil-derived neurotoxin ribonuclease A superfamily.

[0324] CPS 223 corresponds to KIAA0442 which encodes autism-related protein 1. This gene has LocusID: 26053, and is located on chromosome 7 with reported cytogenetic location 7p13. The gene resides in genomic locus NT_{—}007758 (NCBI Genome Annotation).

[0325] Blast search of the Entrez human genome sequence database shows that nucleotides 35 to 1907 of CPS 225 align with various chromosomal regions with 89-90% sequence identity. These regions include LOC255718, LOC140070, and a chromosome 2 region between GPR39 and LOC255521. LOC255718 is located on chromosome 2 and has genomic locus NT_{—}034486 (NCBI Genome Annotation). LOC140070 encodes a protein similar to Protein CDC27Hs (Cell division cycle protein 27 homolog) (H-NUC). It is located on chromosome Yq11.1 and has genomic locus NT_{—}011878. GPR39 and LOC255521 reside in genomic locus NT_{—}034487. GPR39 encodes G protein-coupled receptor 39, and has LocusID: 2863 and reported cytogenetic location 2q21-q22.

[0326] Nucleotides 1317 to 1481 of CPS 225 have 98% sequence identity with a chromosome 12 region near LOC256746. LOC256746 encodes phosphodiesterase 3A, cGMP-inhibited. Nucleotides 1381 to 1418 and 1461 to 1502 have 100% sequence identity with an intron sequence of LOC 126500. LOC 126500 encodes a protein similar to hypothetical zinc finger protein KIAA 1473. It is located on chromosome 19p 13.11, and resides in genomic locus NT_{—}033317. Other fragments of CPS 225 have 84-93% sequence identity with regions on chromosomes 7, 11, 14, 18 and 21.

[0327] Blast search of the Entrez human genome sequence database shows that CPS 226 aligns to a region located in an intron of ATP8A. CPS 226 aligns with the non-protein-coding strand of ATP8A2. ATP8A2 encodes ATPase, aminophospholipid transporter-like, Class I, type 8A, member 2. ATP8A2 gene has LocusID: 51761, and is located on chromosome 13 with reported cytogenetic location 13q12-13. ATP8A2 resides in genomic locus NT_{—}009799 (NCBI Genome Annotation). ATP8A2 gene product may be a tumor suppressor. Loss of its function can convert cells to tumorigenic phenotype.

[0328] CPS 227 corresponds to ARHC which encodes ras homolog gene family, member C. This gene has LocusID: 389, and is located on chromosome 1 with reported cytogenetic location 1p21-p13. The gene resides in genomic locus NT_{—}019273 (NCBI Genome Annotation). The gene product can regulate reorganization of the actin cytoskeleton. CPS 227 aligns with the 3′ UTR region of ARHC. The alignment is also 3′ to MOV10 which encodes Mov10, Moloney leukemia virus 10, homolog (mouse). MOV10 has LocusID: 4343 and reported cytogenetic location 1p12. It resides in genomic locus NT_{—}019273.

[0329] CPS 228 corresponds to CREM which encodes cAMP responsive element modulator. This gene has LocusID: 1390, and is located on chromosome 10 with reported cytogenetic location 10p12.1-p11.1. The gene resides in genomic locus NT_{—}033896 (NCBI Genome Annotation). Cyclic AMP-responsive element modulator is a regulator of the transcription of cAMP-inducible genes.

[0330] CPS 229 corresponds to ISG15 which encodes interferon-stimulated protein, 15 kDa. This gene has LocusID: 9636, and is located on chromosome 1 with reported cytogenetic location 1p36.33. The gene resides in genomic locus NT_{—}004350 (NCBI Genome Annotation). The expression of ISG15 can be induced by interferon.

[0331] CPS 230 corresponds to CCR7 which encodes chemokine (C-C motif) receptor 7. This gene has LocusID: 1236, and is located on chromosome 17 with reported cytogenetic location 17q12-q21.2. The gene resides in genomic locus NT_{—}024901 (NCBI Genome Annotation). The gene product is a G protein-coupled receptor, and can bind to CC chemokine ELC and mediate intracellular calcium flux.

[0332] CPS 231 corresponds to F11 which encodes coagulation factor XI (plasma thromboplastin antecedent). This gene has LocusID: 2160, and is located on chromosome 4 with reported cytogenetic location 4q35. The gene resides in genomic locus NT_{—}022792 (NCBI Genome Annotation). Alternative splicing of the gene results in at least two transcripts. One transcript encodes the circulating plasma factor XI and an alternate transcript lacking exon 5 encodes the platelet factor XI. The plasma factor XI is present in plasma as a zymogen. The platelet factor XI is localized to platelets and megakaryocytes, and may play a role both in the maintenance of normal hemostasis and as a substitute for plasma factor XI.

[0333] Blast search of the Entrez human genome sequence database shows that CPS 232 aligns with a chromosome 4 region near LOC166760. This chromosome 14 region resides in genomic locus NT_{—}006344 (NCBI Genome Annotation). LOC166760 has reported cytogenetic location 4p 15.32.

[0334] CPS 233 corresponds to UNK_AC002073 (MGC17330) which encodes hypothetical protein MGC17330. This gene has LocusID: 113791, and is located on chromosome 22 with reported cytogenetic location 22q11.2-q22. The gene resides in genomic locus NT_{—}011520 (NCBI Genome Annotation).

[0335] CPS 234 corresponds to STK17A which encodes serine/threonine kinase 17a (apoptosis-inducing). This gene has LocusID: 9263, and is located on chromosome 7 with reported cytogenetic location 7p12-p14. The gene resides in genomic locus NT_{—}007819 (NCBI Genome Annotation). The alignment of CPS 234 and STK17A resides in an intron of FLJ10803. FLJ10803 encodes hypothetical protein FLJ10803, and has LocusID: 55744 and reported cytogenetic location 7p 15.1.

[0336] CPS 235 corresponds to BLVRA which encodes biliverdin reductase A. This gene has LocusID: 644, and is located on chromosome 7 with reported cytogenetic location 7p14-cen. The gene resides in genomic locus NT_{—}007819 (NCBI Genome Annotation).

[0337] CPS 236 corresponds to SPP1 which encodes secreted phosphoprotein 1 (osteopontin, bone sialoprotein I, early T-lymphocyte activation 1). This gene has LocusID: 6696, and is located on chromosome 4 with reported cytogenetic location 4q21-q25. The gene resides in genomic locus NT_{—}006204 (NCBI Genome Annotation). The gene product is a bone and blood vessel extracellular matrix protein involved in calcification and atherosclerosis.

[0338] CPS 237 corresponds to STX1A which encodes syntaxin 1A (brain). This gene has LocusID: 6804, and is located on chromosome 7 with reported cytogenetic location 7q11.23. The gene resides in genomic locus NT_{—}007758 (NCBI Genome Annotation). Syntaxin 1A (brain) may be involved in intracellular transport and neurotransmitter release.

[0339] CPS 238 corresponds to TKTL1 which encodes transketolase-like 1. This gene has LocusID: 8277, and is located on chromosome X with reported cytogenetic location Xq28. The gene resides in genomic locus NT_{—}025965 (NCBI Genome Annotation). Transketolase-like 1 is a thiamine pyrophosphate-dependent enzyme of pentose phosphate pathway.

[0340] CPS 239 corresponds to IER3 which encodes immediate early response 3. This gene has LocusID: 8870, and is located on chromosome 6 with reported cytogenetic location 6p21.3. The gene resides in genomic locus NT_{—}007592 (NCBI Genome Annotation). This gene functions in the protection of cells from Fas or tumor necrosis factor type alpha-induced apoptosis. Alternative splicing of this gene results in at least two transcript variants.

[0341] CPS 241 corresponds to PLAU which encodes plasminogen activator, urokinase. This gene has LocusID: 5328, and is located on chromosome 10 with reported cytogenetic location 10q24. The gene resides in genomic locus NT_{—}033890 (NCBI Genome Annotation). Urokinase plasminogen activator is a serine protease that cleaves plasminogen to form plasmin.

[0342] CPS 242 corresponds to ASS which encodes argininosuccinate synthetase. This gene has LocusID: 445, and is located on chromosome 9 with reported cytogenetic location 9q34.1. The gene resides in genomic locus NT_{—}008338 (NCBI Genome Annotation). The protein encoded by this gene catalyzes the penultimate step of the arginine biosynthetic pathway. There are approximately 10 to 14 copies of this gene including the pseudogenes scattered across the human genome, among which the one located on chromosome 9 appears to be the only functional gene for argininosuccinate synthetase. Mutations in the chromosome 9 copy of ASS cause citrullinemia. At least two alternatively spliced transcript variants of this gene have been reported.

[0343] CPS 242 also has 87-94% sequence identity with various regions on chromosome 2, 4, 5, 6, 7, 9, 11, 12 and X. These regions include LOC167449, LOC222906, ASSP2, ASSP3, ASSP4, ASSP5, LOC158452, LOC253843, LOC120341, LOC167519, and an intron of intron of LOC90957. LOC167449 encodes a protein similar to argininosuccinate synthetase and resides in genomic locus NT_{—}006431 with reported cytogenetic location 5q11.2. LOC222906 encodes a protein similar to argininosuccinate synthetase, and resides in genomic locus NT_{—}007819 with reported cytogenetic location 7p21.3. ASSP2 (LocusID: 447) encodes argininosuccinate synthetase pseudogene 2, and resides in genomic locus NT_{—}007592 with reported cytogenetic location 6p22.1. ASSP3 (LocusID: 448) encodes argininosuccinate synthetase pseudogene 3, and resides in genomic locus NT_{—}033256 with reported cytogenetic location 9q11-q22. ASSP4 (LocusID: 449) encodes argininosuccinate synthetase pseudogene 4, and resides in genomic locus NT_{—}025302 with reported cytogenetic location Xpter-p22. ASSP5 (LocusID: 450) encodes argininosuccinate synthetase pseudogene 5, and resides in genomic locus NT_{—}028405 with reported cytogenetic location Xq22-q26. LOC158452 encodes a protein similar to argininosuccinate synthetase, and resides in genomic locus NT_{—}023935 with reported cytogenetic location 9q21.31. LOC253843 encodes a protein similar to argininosuccinate synthetase, and resides in genomic locus NT_{—}006258 on chromosome 4. LOC120341 encodes a protein similar to argininosuccinate synthetase, and resides in genomic locus NT_{—}009151 with reported cytogenetic location 11q23.1. LOC167519 encodes a protein similar to argininosuccinate synthetase, and resides in genomic locus NT_{—}034778 with reported cytogenetic location 5q31.3. LOC90957 (LocusID: 90957) encodes DEAH-box RNA/DNA helicase AAM73547, and resides in genomic locus NT_{—}005367 with reported cytogenetic location 2p22.3.

[0344] Affymetrix annotation suggests that CPS 244 corresponds to DUXI which encodes double homeobox, 1. The gene has LocusID: 26584.

[0345] Blast search of the Entrez human genome sequence database shows that nucleotides 1 to 689 of AJ001481 (SEQ ID NO: 227) align with two chromosome 4 regions with 85-88% sequence identity. The first region is located 3′ to LOC131308. LOC131308 encodes a protein similar to FSHD Region Gene 2 protein. It has reported cytogenetic location 3p14.1 and resides in genomic locus NT_{—}022665. The second region is located near TRAP95. TRAP95 encodes thyroid hormone receptor-associated protein, 95-kD subunit. TRAP95 has LocusID: 10025 and reported cytogenetic location 19p13.3. It resides in genomic locus NT_{—}011277. TRAP95 gene product is a subunit of TRAP thyroid hormone receptor-associated protein complex, and functions as a coactivator for nuclear receptors.

[0346] CPS 245 corresponds to GPA33 which encodes glycoprotein A33 (transmembrane). This gene has LocusID: 10223, and is located on chromosome 1 with reported cytogenetic location 1q23.2. The gene resides in genomic locus NT_{—}004668 (NCBI Genome Annotation). The glycoprotein encoded by this gene is a cell surface antigen that is expressed in human colon cancers. The sequence of the extracellular region of the encoded protein contains 2 domains characteristic of the CD2 subgroup of the immunoglobulin (Ig) superfamily. The encoded protein may play a role in cell adhesion.

[0347] CPS 246 corresponds to PAI1 (SERPINE1) which encodes serine (or cysteine) proteinase inhibitor, clade E (nexin, plasminogen activator inhibitor type 1), member 1. This gene has LocusID: 5054, and is located on chromosome 7 with reported cytogenetic location 7q21.3-q22. The gene resides in genomic locus NT_{—}007933 (NCBI Genome Annotation). The gene product may regulate fibrinolysis. It is a member of the serpin family of serine protease inhibitors.

[0348] CPS 247 corresponds to CYP1B1 which encodes cytochrome P450, subfamily I (dioxin-inducible), polypeptide 1 (glaucoma 3, primary infantile). This gene has LocusID: 1545, and is located on chromosome 2 with reported cytogenetic location 2p21. The gene resides in genomic locus NT_{—}005367 (NCBI Genome Annotation). This gene product is a member of the cytochrome P450 superfamily of enzymes. The cytochrome P450 proteins are monooxygenases which catalyze many reactions involved in drug metabolism and synthesis of cholesterol, steroids and other lipids. The enzyme encoded by CYP1B1 gene localizes to the endoplasmic reticulum and metabolizes procarcinogens such as polycyclic aromatic hydrocarbons and 17beta-estradiol. Mutations in this gene have been associated with primary congenital glaucoma.

[0349] CPS 249 corresponds to HU-K5 (MGLL) which encodes monoglyceride lipase. This gene has LocusID: 11343, and is located on chromosome 3 with reported cytogenetic location 3q21.3. The gene resides in genomic locus NT_{—}005588 (NCBI Genome Annotation). The gene product may function in regulating levels of lysophospholipids.

[0350] Affymetrix annotation suggests that CPS 250 corresponds to DORA. DORA is also known as IGSF6 which encodes immunoglobulin superfamily, member 6. The gene has LocusID: 10261, and is located at chromosome 16p12-p13.

[0351] Blast search of the Entrez human genome sequence database shows that CPS 250 has at least 97% sequence identity with an intron sequence of DREVI. DREVI encodes CGI-81 protein. DREV1 has LocusID: 51108, and is located on chromosome 16 with reported cytogenetic location 16p 13-p 12. The gene resides in genomic locus NT_{—}010441 (NCBI Genome Annotation).

[0352] CPS 253 corresponds to MD-2 which encodes MD-2 protein. This gene has LocusID: 23643, and is located on chromosome 8 with reported cytogenetic location 8q13.2. The gene resides in genomic locus NT_{—}008209 (NCBI Genome Annotation). The MD-2 protein appears to associate with toll-like receptor 4 on the cell surface and confer responsiveness to lipopolysaccyaride (LPS), thus providing a link between the receptor and LPS signaling.

[0353] CPS 254 corresponds to UNK_U07563 (RRP4) which encodes homolog of yeast RRP4 (ribosomal RNA processing 4), 3′-5′-exoribonuclease. This gene has LocusID: 23404, and is located on chromosome 9 with reported cytogenetic location 9q34. The gene resides in genomic locus NT_{—}008338 (NCBI Genome Annotation). The gene product, also known as ribosomal RNA processing 4, is similar to S. cerevisiae RRP4 which is a component of both the nuclear and cytoplasmic forms of the ribosomal RNA processing 3′-5′ exosome complex. UNK_U07563 or RRP4 gene product may function in ribosomal RNA processing.

[0354] Affymetrix annotation suggests that CPS 255 corresponds to SPINK1 which encodes serine protease inhibitor, Kazal type 1. The gene has LocusID: 6690 and reported cytogenetic location 5q32.

[0355] Blast search of the Entrez human genome sequence database shows that CPS 255 has at least 97% sequence identity with a chromosome 5 region between LOC256135 and KIAA0555. Both LOC256135 and KIAA0555 reside in genomic locus NT_{—}006859 (NCBI Genome Annotation). LOC256135 encodes a protein similar to N-formyl peptide receptor. KIAA0555 encodes KIAA0555 gene product, and has LocusID: 9832 and reported cytogenetic location 5q32.

[0356] CPS 256 corresponds to UNK_S82470 (also known as BB1 or LENG4) which encodes leukocyte receptor cluster (LRC) member 4. This gene has LocusID: 79143, and is located on chromosome 19 with reported cytogenetic location 19q13.4. The gene resides in genomic locus NT_{—}011148 (NCBI Genome Annotation).

[0357] Affymetrix annotation suggests that CPS 257 corresponds to IGHG3. The gene encodes immunoglobulin heavy constant gamma 3 (G3m marker), and has LocusID: 3502. The gene is located at chromosome 14q32.33.

[0358] Blast search of the Entrez human genome sequence database shows that CPS 257 has at least 96% sequence identity with a chromosome 14 region near LOC122595. LOC122595 has reported cytogenetic location 14q32.33 and resides in genomic locus NT_{—}010168 (NCBI Genome Annotation).

[0359] CPS 260 corresponds to TNFRSF12 which encodes tumor necrosis factor receptor superfamily, member 12 (translocating chain-association membrane protein). This gene has LocusID: 8718, and is located on chromosome 1 with reported cytogenetic location 1p36.2. The gene resides in genomic locus NT_{—}028054 (NCBI Genome Annotation). The gene product contains a cytoplasmic death domain and transmembrane domains. It can induce apoptosis and activates NF-kappaB.

[0360] CPS 261 corresponds to UNK_AL031685 (KIAA0939) which encodes KIAA0939 protein. This gene has LocusID: 23315, and is located on chromosome 20 with reported cytogenetic location 20q13.13. The gene resides in genomic locus NT_{—}011362 (NCBI Genome Annotation).

[0361] CPS 262 corresponds to UNK_AL049963 (LOC64116) which encodes a protein up-regulated by BCG-CWS. This gene has LocusID: 64116, and is located on chromosome 4 with reported cytogenetic location 4q22-q24. The gene resides in genomic locus NT_{—}006383 (NCBI Genome Annotation).

[0362] Affymetrix annotation suggests that CPS 263 corresponds to APELIN which encodes apelin, a peptide ligand for APJ receptor. The gene has LocusID: 8862, and is located at chromosome Xq25-26.3.

[0363] Blast search of the Entrez human genome sequence database shows that CPS 263 aligns with OCRL with at least 97% sequence identity. OCRL refers to oculocerebrorenal syndrome of Lowe. This gene has LocusID: 4952, and is located on chromosome X with reported cytogenetic location Xq25-q26.1. The gene resides in genomic locus NT_{—}011786 (NCBI Genome Annotation). Mutations in this gene are linked to the disease oculocerebrorenal syndrome of Lowe. The encoded protein is a phospatidylinositol polyphosphate 5-phosphatase that can be found in golgi cistemae.

[0364] CPS 264 corresponds to VEGF which encodes vascular endothelial growth factor. This gene has LocusID: 7422, and is located on chromosome 6 with reported cytogenetic location 6p12. The gene resides in genomic locus NT_{—}007592 (NCBI Genome Annotation). Vascular endothelial growth factor can induce endothelial cell proliferation and vascular permeability.

[0365] CPS 265 corresponds to ELAVL2 which encodes ELAV (embryonic lethal, abnormal vision, Drosophila)-like 2 (Hu antigen B). This gene has LocusID: 1993, and is located on chromosome 9 with reported cytogenetic location 9p21. The gene resides in genomic locus NT_{—}023974 (NCBI Genome Annotation). The gene product can bind to 3′-untranslated regions of mRNA.

[0366] CPS 266 corresponds to PPP2R2A which encodes protein phosphatase 2 (formerly 2A), regulatory subunit B (PR 52), alpha isoform. This gene has LocusID: 5520, and is located on chromosome 8 with reported cytogenetic location 8p21.1. The gene resides in genomic locus NT_{—}023666 (NCBI Genome Annotation).

[0367] Nucleotides 163 to 505 of CPS 266 have 96% sequence identity with an intron sequence of TSC22. TSC22 encodes transforming growth factor beta-stimulated protein TSC-22. It has LocusID: 8848, and resides in genomic locus NT_{—}033922 with reported cytogenetic location 13q14. CPS 266 aligns with the non-protein-coding strand of the gene.

[0368] CPS 267 corresponds to UNK_AF001862 (FYB) which encodes FYN binding protein (FYB-120/130). This gene has LocusID: 2533, and is located on chromosome 5 with reported cytogenetic location 5 p13.1. The gene resides in genomic locus NT_{—}023195 (NCBI Genome Annotation). FYN-binding protein can modulate interleukin 2 production.

[0369] CPS 268 corresponds to OAS1 which encodes 2′,5′-oligoadenylate synthetase 1 (40-46 kD). This gene has LocusID: 4938, and is located on chromosome. 12 with reported cytogenetic location 12q24.1. The gene resides in genomic locus NT_{—}009770 (NCBI Genome Annotation). This gene product is a member of the 2′, 5′ oligoadenylate synthase family. It can be induced by interferons and catalyze the 2′, 5′ oligomers of adenosine in order to bind and activate RNase L. This gene family plays a significant role in the inhibition of cellular protein synthesis and viral infection resistance. Alternative splicing of OAS 1 gene produces at least two isoforms.

[0370] CPS 269 corresponds to CYBB which encodes cytochrome b-245, beta polypeptide (chronic granulomatous disease). This gene has LocusID: 1536, and is located on chromosome X with reported cytogenetic location Xp21.1. The gene resides in genomic locus NT_{—}011657 (NCBI Genome Annotation). Cytochrome b (−245) is composed of cytochrome b alpha (CYBA) and beta (CYBB) chain. It has been proposed as a primary component of the microbicidal oxidase system of phagocytes. CYBB deficiency is one of five described biochemical defects associated with chronic granulomatous disease (CGD). In this disorder, there is decreased activity of phagocyte NADPH oxidase. Neutrophils are able to phagocytize bacteria but cannot kill them in the phagocytic vacuoles. The cause of the killing defect may be an inability to increase the cell's respiration and consequent failure to deliver activated oxygen into the phagocytic vacuole.

[0371] CPS 270 corresponds to GFPT2 which encodes glutamine-fructose-6-phosphate transaminase 2. This gene has LocusID: 9945, and is located on chromosome 5 with reported cytogenetic location 5q34-q35. The gene resides in genomic locus NT_{—}006519 (NCBI Genome Annotation). The encoded protein is an enzyme of the hexosamine biosynthetic pathway.

[0372] Affymetrix annotation suggests that CPS 271 corresponds to BNIP3 which encodes BCL2/adenovirus E1B 19 kDa interacting protein 3. The gene has LocusID: 664, and is located at chromosome 14q11.2-q12.

[0373] Blast search of the Entrez human genome sequence database shows that CPS 271 has 100% sequence identity with an intron sequence of LOC159348. LOC159348 is located at chromosome 10q26.3 and has genomic locus NT_{—}024040 (NCBI Genome Annotation). Nucleotides 1 to 451 of CPS 270 have 97% sequence identity with a region 3′ to the protein-coding sequence of LOC254590. LOC254590 resides in genomic locus NT_{—}025892 on chromosome 14. In addition, nucleotides 4 to 450 align to a chromosome 15 region near CAPN3 with 81% sequence identity. CAPN3 encodes calpain 3, (p94), and has LocusID: 825 and reported cytogenetic location 15q15.1-q21.1. CAPN3 resides in genomic locus NT_{—}030828.

[0374] CPS 272 corresponds to BST1 which encodes bone marrow stromal cell antigen 1. This gene has LocusID: 683, and is located on chromosome 4 with reported cytogenetic location 4p 15. The gene resides in genomic locus NT_{—}006344 (NCBI Genome Annotation). Bone marrow stromal cell antigen 1 is a stromal cell line-derived glycosylphosphatidylinositol-anchored molecule that facilitates pre-B-cell growth. BST1 expression can be enhanced in bone marrow stromal cell lines derived from patients with rheumatoid arthritis. The polyclonal B-cell abnormalities in rheumatoid arthritis may be, at least in part, attributed to BST1 over-expression in the stromal cell population.

[0375] CPS 273 corresponds to UNK_U50535 (CG005) which encodes hypothetical protein from BCRA2 region. This gene has LocusID: 10443, and is located on chromosome 13 with reported cytogenetic location 13q12-q13. The gene resides in genomic locus NT_{—}009984 (NCBI Genome Annotation). The gene product has a region of low similarity to a region of rat 2′,3′-cyclic nucleotide 3′-phosphodiesterase

[0376] CPS 274 corresponds to CX3CR1 which encodes chemokine (CX3C) receptor 1. This gene has LocusID: 1524, and is located on chromosome 3 with reported cytogenetic location 3p21.3. The gene resides in genomic locus NT_{—}005498 (NCBI Genome Annotation). CX3C chemokine receptor is a G protein-coupled receptor. It can mediate leukocyte migration and adhesion, bind the CX3C chemokine fractalkine and signal through a pertussis toxin sensitive G-protein.

[0377] CPS 275 corresponds to CKTSF1B1 which encodes cysteine knot superfamily 1, BMP antagonist 1. This gene has LocusID: 26585, and is located on chromosome 15 with reported cytogenetic location 15q13-q15. The gene resides in genomic locus NT_{—}024680 (NCBI Genome Annotation). The gene product is a homolog of Xenopus laevis Gremlin which is a secreted protein that blocks signaling of bone morphogenetic protein (BMP) by preventing access to the BMP receptor.

[0378] CPS 276 corresponds to VNN2 which encodes vanin 2. This gene has LocusID: 8875, and is located on chromosome 6 with reported cytogenetic location 6q23-q24. The gene resides in genomic locus NT_{—}025741 (NCBI Genome Annotation). This gene product is a member of the Vanin family of proteins which share sequence similarity with each other, and also with biotimidase. The family includes secreted and membrane-associated proteins, a few of which have been reported to participate in hematopoietic cell trafficking. Members of this family possess pantetheinase activity, and may play a role in oxidative-stress response. Vanin 2 is a GPI-anchored cell surface molecule that plays a role in transendothelial migration of neutrophils. VNN2 gene lies in close proximity to, and in same transcriptional orientation as two other vanin genes on chromosome 6q23-q24. Two transcript variants encoding different isoforms have been described for this gene.

[0379] CPS 277 corresponds to KIAA0064 (SNX17) which encodes sorting nexin 17. This gene has LocusID: 9784, and is located on chromosome 2 with reported cytogenetic location 2p23-p22. The gene resides in genomic locus NT_{—}005204 (NCBI Genome Annotation).

[0380] CPS 278 corresponds to GRO1 which encodes GRO1 oncogene (melanoma growth stimulating activity, alpha). This gene has LocusID: 2919, and is located on chromosome 4 with reported cytogenetic location 4q21. The gene resides in genomic locus NT_{—}006216 (NCBI Genome Annotation). The gene product has melanoma growth stimulating activity. It may be a mitogenic factor involved in inflammatory processes.

[0381] CPS 278 has 88% sequence identity with GRO2 which encodes GRO2 oncogene. GRO2 has LocusID: 2920, and resides in genomic locus NT_{—}006216 with reported cytogenetic location 4q21.

[0382] CPS 279 corresponds to KIAA0655 (HIP12) which encodes huntingtin interacting protein 12. This gene has LocusID: 9026, and is located on chromosome 12 with reported cytogenetic location 12q24. The gene resides in genomic locus NT_{—}009464 (NCBI Genome Annotation).

[0383] Nucleotides 13 to 332 of CPS 279 aligns to an intron of DNAH 11 with 100% sequence identity. DNAH11 encodes dynein, axonemal, heavy polypeptide 11. It has LocusID: 8701, and

[0384] resides in genomic locus NT_{—}007819 with reported cytogenetic location 7p21. CPS 279 aligns with the non-protein-coding strand of DNAH11.

[0385] CPS 280 corresponds to RB1 which encodes retinoblastoma 1 (including osteosarcoma). This gene has LocusID: 5925, and is located on chromosome 13 with reported cytogenetic location 13q14.2. The gene resides in genomic locus NT_{—}033922 (NCBI Genome Annotation). Retinoblastoma protein 1 is a nuclear phosphoprotein with DNA binding activity. It can interact with histone deacetylase to repress transcription.

[0386] CPS 281 corresponds to KIAA0073 which encodes KIAA0073 protein. This gene has LocusID: 23398, and is located on chromosome 5 with reported cytogenetic location 5q12.3. The gene resides in genomic locus NT_{—}006431 (NCBI Genome Annotation).

[0387] CPS 282 corresponds to CAPN4 (CAPNS1) which encodes calpain, small subunit 1. This gene has LocusID: 826, and is located on chromosome 19 with reported cytogenetic location 19q13.13. The gene resides in genomic locus NT_{—}011296 (NCBI Genome Annotation). Calpains are a ubiquitous, well-conserved family of calcium-dependent, cysteine proteases. Calpain I and II are heterodimeric with distinct large subunits associated with common small subunits. CAPN4 (CAPNS I) gene encodes a small subunit common to both calpain I and II and is associated with myotonic dystrophy.

[0388] CPS 284 corresponds to MGSTIL1 (PTGES) which encodes prostaglandin E synthase. This gene has LocusID: 9536, and is located on chromosome 9 with reported cytogenetic location 9q34.3. The gene resides in genomic locus NT_{—}029366 (NCBI Genome Annotation). Prostaglandin (PG) E synthase is involved in eicosanoid and glutathione metabolism. It is a member of superfamily of membrane associated proteins.

[0389] CPS 285 corresponds to C1NH (SERPINGI) which encodes serine (or cysteine) proteinase inhibitor, clade G (C1 inhibitor), member 1, (angioedema, hereditary). This gene has LocusID: 710, and is located on chromosome 11 with reported cytogenetic location 11q12-q13.1. The gene resides in genomic locus NT_{—}033903 (NCBI Genome Annotation). The protein encoded by C1NH gene can inhibit activated C1r and C1s of the first complement component and thus regulate complement activation. Deficiency of the encoded protein may be associated with hereditary angioneurotic oedema (HANE). The encoded protein is a member of the serine protease inhibitor (serpin) superfamily.

[0390] Affymetrix annotation suggests that CPS 286 corresponds to H1FX. H1FX encodes H1 histone family, member X. It has LocusID: 8971.

[0391] CPS 287 corresponds to IL1B which encodes interleukin 1, beta. This gene has LocusID: 3553, and is located on chromosome 2 with reported cytogenetic location 2q14. The gene resides in genomic locus NT_{—}022135 (NCBI Genome Annotation). Interleukin 1 beta may initiate and amplify the immune and inflammatory responses.

[0392] CPS 288 corresponds to F3 which encodes coagulation factor III (thromboplastin, tissue factor). This gene has LocusID: 2152, and is located on chromosome 1 with reported cytogenetic location 1p22-p21. The gene resides in genomic locus NT_{—}021979 (NCBI Genome Annotation). Coagulation factor III which is a cell surface glycoprotein. This factor enables cells to initiate the blood coagulation cascades, and it functions as the high-affinity receptor for the coagulation factor VII. The resulting complex provides a catalytic event that is responsible for initiation of the coagulation protease cascades by specific limited proteolysis. There are at least three distinct domains of this factor: extracellular, transmembrane, and cytoplasmic. The factor functions in normal hemostasis, and is a component of the cellular immune response.

[0393] CPS 289 corresponds to DUSP4 which encodes dual specificity phosphatase 4. This gene has LocusID: 1846, and is located on chromosome 8 with reported cytogenetic location 8p12-p11. The gene resides in genomic locus NT_{—}030743 (NCBI Genome Annotation). The protein encoded by this gene is a member of the dual specificity protein phosphatase subfamily. These phosphatases inactivate their target kinases by dephosphorylating both the phosphoserine/threonine and phosphotyrosine residues. They negatively regulate members of the mitogen-activated protein (MAP) kinase superfamily (MAPK/ERK, SAPK/JNK, p38), which are associated with cellular proliferation and differentiation. DUSP4 gene product can inactivate ERK1, ERK2 and JNK, is expressed in a variety of tissues, and is localized in the nucleus. Two alternatively spliced transcript variants, encoding distinct isoforms, have been observed for this gene. In addition, multiple polyadenylation sites have been reported.

[0394] Affymetrix annotation suggests that CPS 290 corresponds to HUMRTVLH3. HUMRTVLH3 encodes endogenous retroviral protease. The gene has LocusID: 51354.

[0395] CPS 291 corresponds to UNK_AL049250 (BANP) which encodes BTG3 associated nuclear protein. This gene has LocusID: 54971, and resides in genomic locus NT_{—}010859 on chromosome 18 (NCBI Genome Annotation). The gene product can interact with CAF1, a component of the general transcription multisubunit complex. It is thought that BTG3 is involved in negative control of the cell cycle. The protein encoded by BTG3 gene binds to BTG3. Studies with mouse homolog suggest that this protein may also interact with a specific nuclear matrix/scaffold-associated region (MAR). Transcript variants encoding different isoforms have been described for this gene. The alignment between CPS 291 and BANP overlaps LOC124302 which encodes a protein similar to nuclear pore complex interacting protein. LOC124302 resides in genomic locus NT_{—}010859 with reported cytogenetic location 18p 11.1.

[0396] CPS 291 also aligns with other genes and chromosomal regions with at least 97% sequence identity. These genes and chromosomal regions include LOC92267, LOC146181, LOC146136, KIAA0220, LOC253666, and an intron of LOC220565, a region near LOC255019, a region near LOC83985, a region 5′ to the protein-coding sequence of NPIP, and a region 3′ to the protein-coding sequence of EIF3S8. LOC92267 encodes a protein similar to hypothetical protein FLJ12363. LOC92267 resides in NT_{—}010441 with reported cytogenetic location 16p12.1. CPS 291 aligns with the non-protein-coding strand of LOC92267. LOC146181 encodes a protein similar to Hypothetical protein KIAA0220, and resides in genomic locus NT_{—}010441 with reported cytogenetic location 16p12.2. LOC146136 encodes a protein similar to nuclear pore complex interacting protein, and resides in genomic locus NT_{—}010441 with reported cytogenetic location 16p12.1. KIAA0220 has LocusID: 23117, and resides in genomic locus NT_{—}035362 with reported cytogenetic location 16p12.1. LOC253666 has similarity to rat kidney-specific (KS) gene. LOC253666 resides in genomic locus NT_{—}010604 on chromosome 16. LOC220565 encodes a protein similar to PI-3-kinase-related kinase SMG-1, isoform 1; lambda/iota protein kinase C-interacting protein; phosphatidylinositol 3-kinase-related protein kinase. LOC220565 is located at chromosome 16q13, and resides in genomic locus NT_{—}033291. LOC255019 encodes a protein similar to nuclear pore complex interacting protein, and resides in genomic locus NT_{—}035360 on chromosome 16. LOC83985 encodes spinster-like protein, and has LocusID: 83985. LOC83985 resides in genomic locus NT_{—}035372 with reported cytogenetic location 16q13. NPIP (LocusID: 9284) encodes a nuclear pore complex interacting protein, and resides in genomic locus NT_{—}035359 with reported cytogenetic location 16p 13-p 11. EIF3 S8 encodes eukaryotic translation initiation factor 3, subunit 8 (110 kD). EIF3S8 has LocusID: 8663, and resides in genomic locus NT_{—}010589 with reported cytogenetic location 16p11.2. LOC146452 encodes a protein similar to KIAA0251 hypothetical protein. It resides in genomic locus NT_{—}010478 with reported cytogenetic location 16q22.3.

[0397] Nucleotides 1 to 196 of CPS 291 have about 86% sequence identity with LOC118735. LOC118735 encodes a protein similar to apoptosis response protein (prostate apoptosis response protein 4). LOC 118735 resides in NT_{—}030059 with reported cytogenetic location 10q24.2.

[0398] CPS 292 corresponds to UNK_AB002308 (KIAA0310) which encodes KIAA0310 gene product. This gene has LocusID: 9919, and is located on chromosome 9 with reported cytogenetic location 9q34.3. The gene resides in genomic locus NT_{—}033215 (NCBI Genome Annotation).

[0399] Affymetrix annotation suggests that CPS 293 corresponds to EDNI which encodes endothelin 1. The gene has LocusID: 1906, and is located at chromosome 6p24.1.

[0400] CPS 293 aligns with IL1B with at least 99% sequence identity. IL1B encodes interleukin 1, beta.

[0401] CPS 295 corresponds to FRAT2 which encodes frequently rearranged in advanced T-cell lymphomas 2. This gene has LocusID: 23401, and is located on chromosome 10 with reported cytogenetic location 10q23-q24.1. The gene resides in genomic locus NT_{—}03005 (NCBI Genome Annotation).

[0402] CPS 297 corresponds to IL8 which encodes interleukin 8. This gene has LocusID: 3576, and is located on chromosome 4 with reported cytogenetic location 4q13-q21. The gene resides in genomic locus NT_{—}006216 (NCBI Genome Annotation). Interleukin 8 is a cytokine that plays a role in chemoattraction and activation of neutrophils. It has similarity to several platelet-derived factors.

[0403] Affymetrix annotation suggests that CPS 298 corresponds to FSCN2. FSCN2 encodes fascin homolog 2, actin-bundling protein, retinal (Strongylocentrotus purpuratus). The gene has LocusID: 25794, and is located at chromosome 17q25.

[0404] CPS 300 corresponds to CAMP which encodes cathelicidin antimicrobial peptide. This gene has LocusID: 820, and is located on chromosome 3 with reported cytogenetic location 3p21.3. The gene resides in genomic locus NT_{—}022567 (NCBI Genome Annotation). Cathelicidin antimicrobial peptide is a precursor of a peptide with antibacterial activity.

[0405] CPS 301 corresponds to FCGR1A which encodes Fc fragment of IgG, high affinity Ia, receptor for (CD64). This gene has LocusID: 2209, and is located on chromosome 1 with reported cytogenetic location 1q21.2-q21.3. The gene resides in genomic locus NT_{—}032962 (NCBI Genome Annotation). The gene product, also known as Fc gamma R1, is a receptor for the Fc domain of IgG. It is a member of the immunoglobulin superfamily, and may have a role in immune response.

[0406] CPS 302 corresponds to MAT1A which encodes methionine adenosyltransferase I, alpha. This gene has LocusID: 0.4143, and is located on chromosome 10 with reported cytogenetic location 10q22. The gene resides in genomic locus NT_{—}033890 (NCBI Genome Annotation). Methionine adenosyltransferase I (alpha isoform) catalyzes the formation of S-adenosylmethionine from methionine and ATP. Both the beta and alpha isoforms may be encoded by MATIA. Methionine adenosyltransferase deficiency is known to be caused by recessive as well as dominant mutations, the latter identified in autosomal dominant persistant hypermethioninemia.

[0407] CPS 303 corresponds to CYP4B1 which encodes cytochrome P450, subfamily IVB, polypeptide 1. This gene has LocusID: 1580, and is located on chromosome 1 with reported cytogenetic location 1p34-p12. The gene resides in genomic locus NT_{—}004386 (NCBI Genome Annotation). This gene product is a member of the cytochrome P450 heme-binding monooxygenase superfamily, and can metabolize steroids, fatty acids and xenobiotics.

[0408] Affymetrix annotation suggests that CPS 304 corresponds to MUC3. MUC3 is also known as MUC3A, and encodes mucin 3A, intestinal. The gene has LocusID: 4584 and reported cytogenetic location 7q22.

[0409] Blast search of the Entrez human genome sequence database shows that CPS 304 aligns to regions 5′ to the protein-coding strand of MUC3B with 80-81% sequence identity. MUC3B encodes mucin 3B. It has LocusID: 57876 and reported cytogenetic location 7q22. The gene resides in genomic locus NT_{—}007933.

[0410] CPS 305 corresponds to B7 which encodes B7 protein. This gene has LocusID: 10233, and is located on chromosome 12 with reported cytogenetic location 12p13. The gene resides in genomic locus NT_{—}035206 (NCBI Genome Annotation). The gene product has similarity to the regulatory subunit of protein phosphatases. It contains leucine rich repeats, and may mediate protein-protein interactions.

[0411] CPS 306 corresponds to SCYA20 which encodes small inducible cytokine subfamily A (Cys-Cys), member 20. This gene has LocusID: 6364, and is located on chromosome 2 with reported cytogenetic location 2q33-q37. The gene resides in genomic locus NT_{—}005403 (NCBI Genome Annotation). The protein encoded by this gene is a chemotactic factor for lymphocytes.

[0412] CPS 307 corresponds to ILIRN which encodes interleukin 1 receptor antagonist. This gene has LocusID: 3557, and is located on chromosome 2 with reported cytogenetic location 2q14.2. The gene resides in genomic locus NT_{—}02213 (NCBI Genome Annotation). Interleukin 1 receptor antagonist binds to and inhibits the IL-1 receptor. It is a member of the interleukin-1 (IL-1) family.

[0413] CPS 308 corresponds to ZNF261 which encodes zinc finger protein 261. This gene has LocusID: 9203, and is located on chromosome X with reported cytogenetic location Xq13.1. The gene resides in genomic locus NT_{—}019696 (NCBI Genome Annotation). The gene product contains a putative zinc-binding motif (MYM).

[0414] CPS 309 corresponds to LGALS2 which encodes lectin, galactoside-binding, soluble, 2 (galectin 2). This gene has LocusID: 3957, and is located on chromosome 22 with reported cytogenetic location 22q13.1. The gene resides in genomic locus NT_{—}011520 (NCBI Genome Annotation). Galectin 2 is an actose-binding lectin involved in cell growth regulation.

[0415] CPS 310 corresponds to TGN51 (TGOLN2) which encodes trans-golgi network protein 2. This gene has LocusID: 10618, and is located on chromosome 2 with reported cytogenetic location 2p11.2. The gene resides in genomic locus NT_{—}015805 (NCBI Genome Annotation).

[0416] The biological mechanisms underlying the CCI-779 modulation of the expression levels of the CCI-779 activity genes have yet to be elucidated. Without being limited to any specific theory, the modulation may be attributed to the direct effect of CCI-779 on PBMCs or other blood cells. It may also be caused by the effect of CCI-779 on renal cell carcinoma tumors, which in turn induce the change of the gene expression profile in the peripheral blood cells.

[0417] Some of the CCI-779 activity genes are RCC disease genes that are differentially expressed in PBMCs of RCC patients relative to tumor-free humans. These genes include, for example, TUBB, CTSL, SCYA2, PAI2, UNK_AI679353, SCYA7, ILIR1, THBS1, NCF1, ATP2B1, GRO2, PRF1, DBP, FCGR3B, ADFP, GRO3, C1QR, RNASE2, CBP2, HK3, FOS, PDI2, UNK_U12471 (THBS1), EREG, SPP1, STX1A, TKTL1, DUX1, SPINK1, UNK_AL049963 (LOC64116), BNIP3, GRO1, IL1B, F3, UNK_AL049250, EDN1, FCGR1A, MUC3, B7, SCYA20, IL1RN, and ZNF261. Over the course of CCI-779 therapy, at least one subset of these genes, which are elevated or suppressed in RCC patients, return to the normal baseline levels.

[0418] Table 6 shows examples of RCC disease genes whose expression profiles in PBMCs can be modulated by CCI-779. Modulation of the expression profiles of these genes in ex vivo conditions is also indicated.

[0419] In one experiment, peripheral blood mononuclear cells isolated from tumor-free humans were treated with CCI-779 ex vivo. Comparison of the genes sensitive to CCI-779 treatment ex vivo with the CCI-779 activity genes of the present invention revealed a common set of genes. These genes represent surrogate markers of CCI-779 drug activity in vivo as well as ex vivo.

[0420] As appreciated by those skilled in the art, the above-described methodology can be employed to identify genes whose expression profiles in PBMCs can be modulated by other drugs.

TABLE 6
Modulation of RCC Disease Genes by CCI-779

| | | | RCC- | RCC | RCC 8 wks | RCC 16 wks | |
|---|---|---|---|---|---|---|---|
| | | | Free | Baseline | with CCI-779 | with CCI- | |
| | Entrez | | Average | Average | Average | 779 Average | |
| Gene Name | Accession | Gene Description | (n = 20) | (n = 21) | (n = 21) | (n = 21) | Ex Vivo Description |
| IL1R1 | M27492 | interleukin 1 receptor, type I | 6.20 | 17.86 | 11.29 | 4.00 | 2 fold induced by PHA, |
| | | | | | | | 2-fold downregulated |
| | | | | | | | by 300 nM CCI |
| EDN1 | J05008 | endothelin 1 | 14.55 | 104.62 | 111.95 | 16.00 | 2-fold downregulated |
| | | | | | | | by 300 nM CCI alone |
| | | | | | | | @ 24 h |
| ABL1 | M14752 | v-abl Abelson murine leukemia | 2.35 | 101.76 | 108.33 | 75.90 | 2-fold downregulated |
| | | viral oncogene homolog 1 | | | | | by 300 nM CCI alone |
| | | | | | | | @ 24 h |
| UNK_AF141349 | AF141349 | Tubulin, Beta | 6.55 | 14.00 | 17.33 | 22.48 | 2 fold induced by PHA, |
| | | | | | | | 2-fold downregulated |
| | | | | | | | by 300 nM CCI |
| UNK_AF141349 | AF141349 | Tubulin, Beta | 7.70 | 18.57 | 18.57 | 25.48 | 2 fold induced by PHA, |
| | | | | | | | 2-fold downregulated |
| | | | | | | | by 300 nM CCI |
| FCGR3B | X16863 | Fc fragment of IgG, low | 6.60 | 11.67 | 24.57 | 41.29 | 2-fold downregulated |
| | | affinity IIIb, receptor for | | | | | by 300 nM CCI alone |
| | | (CD16) | | | | | @ 24 h |
| UNK_M14087 | M14087 | Human HL14 gene encoding | 1.80 | 24.14 | 21.29 | 15.00 | 2-fold downregulated |
| | | beta-galactoside-binding lectin, | | | | | by 300 nM CCI alone |
| | | 3′ end, clone2 | | | | | @ 24 h |
| KIAA0168 | W28731 | KIAA0168 gene product | 1.80 | 18.90 | 17.71 | 14.05 | 2-fold downregulated |
| | | | | | | | by 300 nM CCI alone |
| | | | | | | | @ 24 h |
| UNK_M62896 | M62896 | Human lipocortin (LIP) 2 | 2.85 | 5.33 | 5.95 | 8.86 | 2-fold downregulated |
| | | pseudogene mRNA, complete | | | | | by 300 nM CCI alone |
| | | cds-like region | | | | | @ 24 h |
| MS4A3 | L35848 | membrane-spanning 4- | 1.95 | 7.05 | 6.90 | 8.52 | 2-fold downregulated |
| | | domains, subfamily A, member | | | | | by 300 nM CCI alone |
| | | 3 (hematopoietic cell-specific) | | | | | @ 24 h |
| SMARCA4 | U29175 | SWI/SNF related, matrix | 7.75 | 56.14 | 80.19 | 62.86 | 2-fold downregulated |
| | | associated, actin dependent | | | | | by 300 nM CCI alone |
| | | regulator of chromatin, | | | | | @ 24 h |
| | | subfamily a, member 4 | | | | | |
| BASP1 | AA135683 | brain acid-soluble protein 1 | 7.70 | 16.24 | 10.76 | 10.19 | 2 fold induced by PHA, |
| | | | | | | | 2-fold downregulated |
| | | | | | | | by 300 nM CCI |
| CHN2 | U07223 | chimerin (chimaerin) 2 | 3.75 | 11.29 | 11.86 | 10.86 | 2-fold downregulated |
| | | | | | | | by 300 nM CCI alone |
| | | | | | | | @ 24 h |
| FECH | D00726 | ferrochelatase (protoporphyria) | 2.15 | 26.71 | 28.10 | 24.24 | 2-fold downregulated |
| | | | | | | | by 300 nM CCI alone |
| | | | | | | | @ 24 h |
| SCYA2 | M28225 | small inducible cytokine A2 | 9.10 | 82.29 | 43.43 | 6.71 | 2-fold downregulated |
| | | (monocyte chemotactic protein | | | | | by 300 nM CCI alone |
| | | 1, homologous to mouse Sigje) | | | | | @ 24 h |
| AQP9 | AB008775 | aquaporin 9 | 9.40 | 24.57 | 19.76 | 15.76 | 2-fold downregulated |
| | | | | | | | by 300 nM CCI alone |
| | | | | | | | @ 24 h AND 2-fold |
| | | | | | | | induced by PHA, 2-fold |
| | | | | | | | downregulated by 300 nM |
| | | | | | | | CCI |
| TREX1 | AJ243797 | three prime repair exonuclease 1 | 2.90 | 9.29 | 12.90 | 16.19 | 2-fold downregulated |
| | | | | | | | by 300 nM CCI alone |
| | | | | | | | @ 24 h |
| LGALS3 | AB006780 | lectin, galactoside-binding, | 51.40 | 117.90 | 75.81 | 69.86 | 2-fold downregulated |
| | | soluble, 3 (galectin 3) | | | | | by 300 nM CCI alone |
| | | | | | | | @ 24 h |
| UNK_J04178 | J04178 | Human abnormal beta- | 1.85 | 16.24 | 23.19 | 16.38 | 2-fold downregulated |
| | | hexosaminidase alpha chain | | | | | by 300 nM CCI alone |
| | | (HEXA) mRNA, partial cds | | | | | @ 24 h |
| RNASE2 | X55988 | ribonuclease, RNase A family, | 11.30 | 20.81 | 36.24 | 57.24 | 2-fold downregulated |
| | | 2(liver, eosinophil-derived | | | | | by 300 nM CCI alone |
| | | neurotoxin) | | | | | @ 24 h |
| LILRB3 | AF025533 | leukocyte immunoglobulin-like | 18.25 | 34.14 | 39.62 | 59.90 | 2-fold downregulated |
| | | receptor, subfamily B (with | | | | | by 300 nM CCI alone |
| | | TM and ITIM domains), | | | | | @ 24 h AND 2-fold |
| | | member 3 | | | | | induced by PHA, 2-fold |
| | | | | | | | downregulated by 300 nM |
| | | | | | | | CCI |
| PAI2 | Y00630 | plasminogen activator | 84.55 | 287.95 | 160.10 | 33.95 | 2-fold downregulated |
| | | inhibitor, type II (arginine- | | | | | by 300 nM CCI alone |
| | | serpin) | | | | | @ 24 h AND 2-fold |
| | | | | | | | induced by PHA, 2-fold |
| | | | | | | | downregulated by 300 nM |
| | | | | | | | CCI |
| GRO2 | M36820 | GRO2 oncogene | 19.55 | 66.81 | 45.10 | 11.67 | 2-fold downregulated |
| | | | | | | | by 300 nM CCI alone |
| | | | | | | | @ 24 h |
| FCGR1A | M63835 | Fc fragment of IgG, high | 4.05 | 8.24 | 13.95 | 19.95 | 2-fold downregulated |
| | | affinity Ia, receptor for (CD64) | | | | | by 300 nM CCI alone |
| | | | | | | | @ 24 h |
| CTSL | X12451 | cathepsin L | 38.45 | 172.52 | 89.29 | 28.38 | 2 fold induced by PHA, |
| | | | | | | | 2-fold downregulated |
| | | | | | | | by 300 nM CCI |
| IL1RN | X52015 | interleukin 1 receptor | 16.60 | 83.90 | 88.67 | 36.29 | 2-fold downregulated |
| | | antagonist | | | | | by 300 nM CCI alone |
| | | | | | | | @ 24 h AND 2-fold |
| | | | | | | | induced by PHA, 2-fold |
| | | | | | | | downregulated by 300 nM |
| | | | | | | | CCI |
| UNK_AL096744 | AL096744 | Homo sapiens mRNA; cDNA | 5.65 | 27.95 | 29.67 | 23.52 | 2-fold downregulated |
| | | DKFZp566H033 (from clone | | | | | by 300 nM CCI alone |
| | | DKFZp566H033) | | | | | @ 24 h |
| IL1B | M15330 | interleukin 1, beta | 18.45 | 83.10 | 87.24 | 12.43 | 2-fold downregulated |
| | | | | | | | by 300 nM CCI alone |
| | | | | | | | @ 24 h |
| FABP5 | M94856 | fatty acid binding protein 5 | 7.20 | 31.29 | 21.33 | 7.90 | 2-fold downregulated |
| | | (psoriasis-associated) | | | | | by 300 nM CCI alone |
| | | | | | | | @ 24 h |
| SCYA7 | X72308 | small inducible cytokine A7 | 5.20 | 24.00 | 13.57 | 5.19 | 2-fold downregulated |
| | | (monocyte chemotactic protein 3) | | | | | by 300 nM CCI alone |
| | | | | | | | @ 24 h AND 2-fold |
| | | | | | | | induced by PHA, 2-fold |
| | | | | | | | downregulated by 300 nM |
| | | | | | | | CCI |
| NCF1 | M55067 | neutrophil cytosolic factor 1 | 8.70 | 10.48 | 20.86 | 46.62 | 2-fold downregulated |
| | | (47 kD, chronic granulomatous | | | | | by 300 nM CCI alone |
| | | disease, autosomal 1) | | | | | @ 24 h |
| SELP | M25322 | selectin P (granule membrane | 4.40 | 15.67 | 16.81 | 15.10 | 2-fold downregulated |
| | | protein 140 kD, antigen CD62) | | | | | by 300 nM CCI alone |
| | | | | | | | @ 24 h |
| SCYA20 | U64197 | small inducible cytokine | 2.35 | 7.00 | 11.05 | 2.67 | 2-fold downregulated |
| | | subfamily A (Cys-Cys), | | | | | by 300 nM CCI alone |
| | | member 20 | | | | | @ 24 h |
| GRO1 | X54489 | GRO1 oncogene (melanoma | 2.40 | 24.38 | 18.24 | 3.48 | 2-fold downregulated |
| | | growth stimulating activity, | | | | | by 300 nM CCI alone |
| | | alpha) | | | | | @ 24 h |
| SCYA2 | M26683 | small inducible cytokine A2 | 14.75 | 131.95 | 68.71 | 10.52 | 2-fold downregulated |
| | | (monocyte chemotactic protein | | | | | by 300 nM CCI alone |
| | | 1, homologous to mouse Sigje) | | | | | @ 24 h |
| TUBB | X79535 | tubulin, beta polypeptide | 8.70 | 19.00 | 31.57 | 41.52 | 2 fold induced by PHA, |
| | | | | | | | 2-fold downregulated |
| | | | | | | | by 300 nM CCI |

[0421] C. Monitoring CCI-779 Drug Activities

[0422] The CCI-779 activity genes identified in the present invention can be used to monitor CCI-779 drug activities in a patient who is subject to a CCI-779 treatment. Peripheral blood samples can be isolated at different stages of the CCI-779 treatment. The expression profile of one or more CCI-779 activity genes in these peripheral blood samples can be determined and compared to a reference expression profile. A change in the gene expression profile indicates in vivo activities of CCI-779. In one embodiment, the patent has RCC or another solid tumor.

[0423] Numerous methods are available for detecting gene expression profiles. In one aspect, the expression profiles of CCI-779 activity genes are determined by measuring the levels of RNA transcripts of these genes in peripheral blood samples. Suitable methods for this purpose include, but are not limited to, RT-PCT, Northern Blot, in situ hybridization, slot-blotting, nuclease protection assay, and nucleic acid arrays. The peripheral blood samples can be, without limitation, whole blood samples or samples containing enriched PBMCs.

[0424] In one embodiment, RNA isolated from peripheral blood samples can be first amplified to cDNA or cRNA. The amplification can be specific or non-specific. Suitable amplification methods include, but are not limited to, reverse transcriptase PCR, isothermal amplification, ligase chain reaction, and Qbeta replicase. The amplified nucleic acid products can be detected or quantitated, for instance, through hybridization to labeled probes.

[0425] Amplification primers and hybridization probes for a CCI-779 activity gene can be prepared from the gene sequence or its corresponding CPS using numerous methods. Gene sequences suitable for this purpose include, but are not limited to, exons, introns, or the 3′ or 5′ untranslated regions, or any combination thereof. In one embodiment, probes/primers are designed based on the sequence in or near the 3′ protein-coding region of a CCI-779 activity gene. For instance, the nucleotide sequence encoding the last 100 to 300 amino acid residues in the C-terminus region of the CCI-779 activity gene product can be selected to design probes or primers. Where a CCI-779 activity gene is a hypothetical or putative gene whose expression is supported only by EST or mRNA data, or where the genomic location(s) of a CCI-779 activity gene has not been determined or the gene may correspond to multiple genomic-loci, the probes/primers for the gene can be designed based on the corresponding CPS, or the oligonucleotide probes of the corresponding qualifier. Table 5 lists example sequences that are useful for designing probes/primers for detecting the expression profiles of CCI-779 activity genes.

[0426] The length of the probes/primers can be selected to achieve the desired hybridization or amplification effect. For instance, each probe can comprise at least 15, 20, 25, 50, 75, 100, 125, 150, 175, 200, 225, 250, 275, 300, 325, 350, 400 or more nucleotides. In one embodiment, each probe/primer has relatively high sequence complexity and does not have any ambiguous residue (undetermined “n” residues). In another embodiment, the probes/primers can hybridize to the target gene, such as its RNA transcripts or the complements thereof, under stringent or highly stringent conditions.

[0427] As used herein, “stringent conditions” are at least as stringent as, for example, conditions G-L shown in Table 7. “Highly stringent conditions” are at least as stringent as conditions A-F shown in Table 7. As used in Table 7, hybridization is carried out under the hybridization conditions (Hybridization Temperature and Buffer) for about four hours, followed by two 20-minute washes under the corresponding wash conditions (Wash Temp. and Buffer).

TABLE 7
Stringency Conditions

| Stringency | Polynucleotide | Hybrid | Hybridization | Wash Temp. |
|---|---|---|---|---|
| Condition | Hybrid | Length (bp)¹ | Temperature and Buffer^{H} | and Buffer^{H} |
| A | DNA:DNA | >50 | 65° C.; 1xSSC -or- | 65° C.; 0.3xSSC |
| | | | 42° C.; 1xSSC, 50% formamide | |
| B | DNA:DNA | <50 | T_{B}*; 1xSSC | T_{B}*; 1xSSC |
| C | DNA:RNA | >50 | 67° C.; 1xSSC -or- | 67° C.; 0.3xSSC |
| | | | 45° C.; 1xSSC, 50% formamide | |
| D | DNA:RNA | <50 | T_{D}*; 1xSSC | T_{D}*; 1xSSC |
| E | RNA:RNA | >50 | 70° C.; 1xSSC -or- | 70° C.; 0.3xSSC |
| | | | 50° C.; 1xSSC, 50% formamide | |
| F | RNA:RNA | <50 | T_{F}*; 1xSSC | T_{f}*; 1xSSC |
| G | DNA:DNA | >50 | 65° C.; 4xSSC -or- | 65° C.; 1xSSC |
| | | | 42° C.; 4xSSC, 50% formamide | |
| H | DNA:DNA | <50 | T_{H}*; 4xSSC | T_{H}*; 4xSSC |
| I | DNA:RNA | >50 | 67° C.; 4xSSC -or- | 67° C.; 1xSSC |
| | | | 45° C.; 4xSSC, 50% formamide | |
| J | DNA:RNA | <50 | T_{J}*; 4xSSC | T_{J}*; 4xSSC |
| K | RNA:RNA | >50 | 70° C.; 4xSSC -or- | 67° C.; 1xSSC |
| | | | 50° C.; 4xSSC, 50% formamide | |
| L | RNA:RNA | <50 | T_{L}*; 2xSSC | T_{L}*; 2xSSC |
| ¹The hybrid length is that anticipated for the hybridized region(s) of the hybridizing polynucleotides. When hybridizing a polynucleotide to a target polynucleotide of unknown sequence, the hybrid length is assumed to be that of the hybridizing polynucleotide. When polynucleotides of known sequence are hybridized, the hybrid length can be determined by aligning the sequences of the polynucleotides and identifying the region or regions of optimal sequence complementarity. | | | | |
| ^{H}SSPE (1xSSPE is 0.15 M NaCl, 10 mM NaH₂PO₄, and 1.25 mM EDTA, pH 7.4) can be substituted for SSC (1xSSC is 0.15 M NaCl and 15 mM sodium citrate) in the hybridization and wash buffers. | | | | |
| T_{B}* − T_{R}*: The hybridization temperature for hybrids anticipated to be less than 50 base pairs in length should be 5-10° C. less than the melting temperature (Tₘ) of the hybrid, where Tₘ is determined according to the following equations. For hybrids less than 18 base pairs in length, Tₘ(° C.) = 2(# of A + T bases) + 4(# of G + C bases). For hybrids between | | | | |
| # 18 and 49 base pairs in length, Tₘ(° C.) = 81.5 + 16.6(log₁₀Na⁺) + 0.41(% G + C) − (600/N), where N is the number of bases in the hybrid, and Na⁺ is the molar concentration of sodium ions in the hybridization buffer (Na⁺ for 1xSSC = 0.165 M). | | | | |

[0428] In one embodiment, the probes/primers for a CCI-779 activity gene are selected from regions which significantly diverge from the sequences of other genes. Such regions can be determined by checking the probe/primer sequences against a human genome sequence database, such as the Entrez database at the NCBI. One algorithm suitable for this purpose is the BLAST algorithm. This algorithm involves first identifying high scoring sequence pairs (HSPs) by identifying short words of length W in the query sequence, which either match or satisfy some positive-valued threshold score T when aligned with a word of the same length in a database sequence. T is referred to as the neighborhood word score threshold. These initial neighborhood word hits act as seeds for initiating searches to find longer HSPs containing them. The word hits are then extended in both directions along each sequence to increase the cumulative alignment score. Cumulative scores are calculated using, for nucleotide sequences, the parameters M (reward score for a pair of matching residues; always >0) and N (penalty score for mismatching residues; always <0). The BLAST algorithm parameters W, T, and X determine the sensitivity and speed of the alignment. These parameters can be adjusted for different purposes, as appreciated by one of ordinary skill in the art.

[0429] In one aspect, quantitative RT-PCR (such as TaqMan, ABI) is used for detecting and comparing the peripheral blood expression profiles of CCI-779 activity-genes. Quantitative RT-PCR involves reverse transcription (RT) of RNA to cDNA followed by relative quantitative PCR (RT-PCR).

[0430] In PCR, the number of molecules of the amplified target DNA increases by a factor approaching two with every cycle of the reaction until some reagent becomes limiting. Thereafter, the rate of amplification becomes increasingly diminished until there is not an increase in the amplified target between cycles. If one plots a graph on which the cycle number is on the X axis and the log of the concentration of the amplified target DNA is on the Y axis, one observes that a curved line of characteristic shape is formed by connecting the plotted points. Beginning with the first cycle, the slope of the line is positive and constant. This is said to be the linear portion of the curve. After some reagent becomes limiting, the slope of the line begins to decrease and eventually becomes zero. At this point the concentration of the amplified target DNA becomes asymptotic to some fixed value. This is said to be the plateau portion of the curve.

[0431] The concentration of the target DNA in the linear portion of the PCR is proportional to the starting concentration of the target before the PCR was begun. By determining the concentration of the PCR products of the target DNA in PCR reactions that have completed the same number of cycles and are in their linear ranges, it is possible to determine the relative concentrations of the specific target sequence in the original DNA mixture. If the DNA mixtures are cDNAs synthesized from RNAs isolated from different tissues or cells, the relative abundances of the specific mRNA from which the target sequence was derived may be determined for the respective tissues or cells. This direct proportionality between the concentration of the PCR products and the relative mRNA abundances is true in the linear range portion of the PCR reaction.

[0432] The final concentration of the target DNA in the plateau portion of the curve is determined by the availability of reagents in the reaction mix and is independent of the original concentration of target DNA. Therefore, the sampling and quantifying of the amplified PCR products can be carried out when the PCR reactions are in the linear portion of their curves. In addition, relative concentrations of the amplifiable cDNAs can be normalized to some independent standard, which may be based on either internally existing RNA species or externally introduced RNA species. The abundance of a particular mRNA species may also be determined relative to the average abundance of all mRNA species in the sample.

[0433] In one embodiment, the PCR amplification utilizes internal PCR standards that are approximately as abundant as the target. This strategy is effective if the products of the PCR amplifications are sampled during their linear phases. If the products are sampled when the reactions are approaching the plateau phase, then the less abundant product may become relatively over-represented. Comparisons of relative abundances made for many different RNA samples, such as is the case when examining RNA samples for differential expression, may become distorted in such a way as to make differences in relative abundances of RNAs appear less than they actually are. This can be improved if the internal standard is much more abundant than the target. If the internal standard is more abundant than the target, then direct linear comparisons may be made between RNA samples.

[0434] A problem inherent in clinical samples is that they are of variable quantity or quality. This problem can be overcome if the RT-PCR is performed as a relative quantitative RT-PCR with an internal standard in which the internal standard is an amplifiable cDNA fragment that is larger than the target cDNA fragment and in which the abundance of the mRNA encoding the internal standard is roughly 5-100 times higher than the mRNA encoding the target. This assay measures relative abundance, not absolute abundance of the respective mRNA species.

[0435] In another embodiment, the relative quantitative RT-PCR uses an external standard protocol. Under this protocol, the PCR products are sampled in the linear portion of their amplification curves. The number of PCR cycles that are optimal for sampling can be empirically determined for each target cDNA fragment. In addition, the reverse transcriptase products of each RNA population isolated from the various samples can be normalized for equal concentrations of amplifiable cDNAs. While empirical determination of the linear range of the amplification curve and normalization of cDNA preparations are tedious and time-consuming processes, the resulting RT-PCR assays may, in certain cases, be superior to those derived from a relative quantitative RT-PCR with an internal standard.

[0436] Nucleic acid arrays can also be used to detect and compare the expression patterns of CCI-779 activity genes in peripheral blood samples isolated at different CCI-779 treatment stages. Probes suitable for detecting the CCI-779 activity genes can be stably attached to known discrete regions on a support substrate. These probes maintain their positions relative to the respective discrete regions during hybridization and subsequent washes. Construction of nucleic acid arrays is well known in the art. Suitable substrates for making nucleic acid arrays include, but are not limited to, glasses, silica, ceramics, nylons, quartz wafers, gels, metals, papers, beads, tubes, fibers, films, membranes, column matrixes, or microtiter plate wells.

[0437] A nucleic acid array of the present invention can comprise at least 2, 5, 10, 15, 20, 25, 30, 35, 40, 45, 50, 60, 70, 80, 90, 100, 150, 200, 250, or more different polynucleotide probes, each different probe capable of hybridizing to a different respective CCI-779 activity gene. Multiple probes for the same gene can be used on a single nucleic acid array. Examples of probes suitable for this invention are listed in the Qualifier Table. Probes for other drug activities genes can also be included in the nucleic acid arrays of this invention. The probe density on the array can be in any range. For instance, the density may be 50, 100, 200, 300, 400, 500, or more probes/cm².

[0438] In one embodiment, a substantial portion of all polynucleotide probes on a nucleic acid array of the present invention are probes for CCI-779 or other drug activity genes. For instance, at least 10%, 20%, 30%, 40%, 50%, or more of all probes on the nucleic acid array can hybridize under stringent or nucleic acid array hybridization conditions to RNA transcripts, or the complements thereof, of drug activity genes.

[0439] In another embodiment, nuclease protection assays are used to quantify RNAs derived from the peripheral blood samples. There are many different versions of nuclease protection assays. The common characteristic of these nuclease protection assays is that they involve hybridization of an antisense nucleic acid with the RNA to be quantified. The resulting hybrid double-stranded molecule is then treated with a nuclease which digests single-stranded nucleic acids more efficiently than double-stranded molecules. The amount of antisense nucleic acid that survives digestion is a measure of the amount of the target RNA species to be quantified. An example of nuclease protection assays is the RNase protection assay manufactured by Ambion, Inc. (Austin, Tex.).

[0440] In another aspect, the peripheral blood expression profiles of CCI-779 activity genes are determined by measuring the levels of polypeptides encoded by these genes. Methods suitable for this purpose include, but are not limited to, immunoassays such as ELISA, RIA, FACS, dot blot, Western Blot, immunohistochemistry, and antibody-based radioimaging. Other methods such as 2-dimensional SDS-polyacrylamide gel electrophoresis can also be used.

[0441] One exemplary method suitable for detecting the levels of target proteins in peripheral blood samples is ELISA. In an exemplifying ELISA, antibodies capable of binding to the target proteins encoded by one or more CCI-779 activity genes are immobilized onto a selected surface exhibiting protein affinity, such as wells in a polystyrene or polyvinylchloride microtiter plate. Then, peripheral blood samples to be tested are added to the wells. After binding and washing to remove non-specifically bound immunocomplexes, the bound antigen(s) can be detected. Detection can be achieved by the addition of a second antibody which is specific for the target proteins and is linked to a detectable label. Detection may also be achieved by the addition of a second antibody, followed by the addition of a third antibody that has binding affinity for the second antibody, with the third antibody being linked to a detectable label. Before being added to the microtiter plate, cells in the peripheral blood samples can be lysed using various methods known in the art. Proper extraction procedures can be used to separate the target proteins from potentially interfering substances.

[0442] In another exemplifying ELISA, the peripheral blood samples suspected of containing the target proteins are immobilized onto the well surface and then contacted with the antibodies of the invention. After binding and washing to remove non-specifically bound immunocomplexes, the bound antigen is detected. Where the initial antibodies are linked to a detectable label, the immunocomplexes can be detected directly. The immunocomplexes can also be detected using a second antibody that has binding affinity for the first antibody, with the second antibody being linked to a detectable label.

[0443] Another exemplary ELISA involves the use of antibody competition in the detection. In this ELISA, the target proteins are immobilized on the well surface. The labeled antibodies are added to the well, allowed to bind to the target proteins, and detected by means of their labels. The amount of the target proteins in an unknown sample is then determined by mixing the sample with the labeled antibodies before or during incubation with coated wells. The presence of the target proteins in the unknown sample acts to reduce the amount of antibody available for binding to the well and thus reduces the ultimate signal.

[0444] Different ELISA formats can have certain features in common, such as coating, incubating or binding, washing to remove non-specifically bound species, and detecting the bound immunocomplexes. For instance, in coating a plate with either antigen or antibody, the wells of the plate can be incubated with a solution of the antigen or antibody, either overnight or for a specified period of hours. The wells of the plate are then washed to remove incompletely adsorbed material. Any remaining available surfaces of the wells are then “coated” with a nonspecific protein that is antigenically neutral with regard to the test samples. Examples of these nonspecific proteins include bovine serum albumin (BSA), casein and solutions of milk powder. The coating allows for blocking of nonspecific adsorption sites on the immobilizing surface and thus reduces the background caused by nonspecific binding of antisera onto the surface.

[0445] In ELISAs, a secondary or tertiary detection means can also be used. After binding of a protein or antibody to the well, coating with a non-reactive material to reduce background, and washing to remove unbound material, the immobilizing surface is contacted with the control or clinical or biological sample to be tested under conditions effective to allow immunocomplex (antigen/antibody) formation. These conditions may include, for example, diluting the antigens and antibodies with solutions such as BSA, bovine gamma globulin (BGG) and phosphate buffered saline (PBS)/Tween and incubating the antibodies and antigens at room temperature for about 1 to 4 hours or at 4° C. overnight. Detection of the immunocomplex then requires a labeled secondary binding ligand or antibody, or a secondary binding ligand or antibody in conjunction with a labeled tertiary antibody or third binding ligand.

[0446] Following all incubation steps in an ELISA, the contacted surface can be washed so as to remove non-complexed material. For instance, the surface may be washed with a solution such as PBS/Tween, or borate buffer. Following the formation of specific immunocomplexes between the test sample and the originally bound material, and subsequent washing, the occurrence of the amount of immunocomplexes can be determined.

[0447] To provide a detection means, the second or third antibody can have an associated label. In one embodiment, the label is an enzyme that generates color development upon incubating with an appropriate chromogenic substrate. Thus, for example, one may contact and incubate the first or second immunocomplex with a urease, glucose oxidase, alkaline phosphatase or hydrogen peroxidase-conjugated antibody for a period of time and under conditions that favor the development of further immunocomplex formation (e.g., incubation for 2 hours at room temperature in a PBS-containing solution such as PBS-Tween).

[0448] After incubation with the labeled antibody, and subsequent to washing to remove unbound material, the amount of label is quantified, e.g., by incubation with a chromogenic substrate such as urea and bromocresol purple or 2,2′-azido-di-(3-ethyl)-benzthiazoline-6-sulfonic acid (ABTS) and H₂O₂, in the case of peroxidase as the enzyme label. Quantitation can be achieved by measuring the degree of color generation, e.g., using a spectrophotometer.

[0449] Another method suitable for this invention is RIA (radioimmunoassay). An exemplary RIA is based on the competition between radiolabeled-polypeptides and unlabeled polypeptides for binding to a limited quantity of antibodies. Suitable radiolabels include, but are not limited to, I¹²⁵ In one embodiment, a fixed concentration of I¹²⁵-labeled polypeptide is incubated with a series of dilution of an antibody specific to the polypeptide. When the unlabeled polypeptide is added to the system, the amount of the I¹²⁵-polypeptide that binds to the antibody is decreased. A standard curve can therefore be constructed to represent the amount of antibody-bound I¹²⁵-polypeptide as a function of the concentration of the unlabeled polypeptide. From this standard curve, the concentration of the polypeptide in unknown samples can be determined.

[0450] Suitable antibodies for this invention include, but are not limited to, polyclonal antibodies, monoclonal antibodies, chimeric antibodies, humanized antibodies, single chain antibodies, Fab fragments, or fragments produced by a Fab expression library. Methods for making these antibodies are well known in the art.

[0451] In one embodiment, the antibodies of the present invention can bind to the corresponding CCI-779 activity gene products or other desired antigens with a binding affinity constant Kₐ of at least 10⁴ M⁻¹,10⁵ M⁻¹, 10⁶M⁻¹,10⁷ M⁻¹,10⁸ M⁻¹, or more.

[0452] The antibodies of this invention can be labeled with one or more detectable moieties to allow for detection of antibody-antigen complexes. The detectable moieties can include compositions detectable by spectroscopic, enzymatic, photochemical, biochemical, bioelectronic, immunochemical, electrical, optical or chemical means. The detectable moieties include, but are not limited to, radioisotopes, chemiluminescent compounds, labeled binding proteins, heavy metal atoms, spectroscopic markers such as fluorescent markers and dyes, magnetic labels, linked enzymes, mass spectrometry tags, spin labels, electron transfer donors and acceptors, and the like.

[0453] Moreover, the levels of polypeptides in peripheral blood samples can be determined by detecting the biological activities associated with the polypeptides. If a biological function/activity of a polypeptide is known, suitable in vitro bioassays can be designed to evaluate the biological function/activity, which in turn can be used to determine the amount of the polypeptide in the sample.

[0454] Comparison between the expression profile of a patient of interest and a reference expression profile can be conducted manually or electronically. The reference expression profile can be a baseline expression profile representing gene expression in peripheral blood samples isolated prior to a drug treatment. The reference profile can also be an expression profile in peripheral blood samples isolated after initiation of the drug treatment. The reference expression profile can be determine using sample isolated from the patient of interest or other reference patient or patients. In many embodiments, the process or methodology that is used to determine the reference expression profile and the expression profile being compared is identical or comparable.

[0455] In one example, comparison is carried out by comparing each component in the expression profile of the patient of interest to the corresponding component in the reference expression profile(s). The component can be the expression level of a drug activity gene, a ratio between the expression levels of two drug activity genes, or another measure capable of representing gene expression patterns. The expression level of a gene can be an absolute level, or a normalized or relative level. The difference between two corresponding components can be assessed by fold changes, absolute differences, or other suitable means.

[0456] Comparison between expression profiles can also be conducted using pattern recognition or comparison programs. In addition, the serial analysis of gene expression (SAGE) technology, the GEMTOOLS gene expression analysis program (Incyte Pharmaceuticals), the GeneCalling and Quantitative Expression Analysis technology (Curagen), and other suitable methods, programs or systems can be used.

[0457] Multiple drug activity genes can be used in the comparison of expression profiles. For instance, 2, 4, 6, 8, 10, 12, 14, 16, 18, 20, 30, 40, 50, or more drug activity genes can be used.

[0458] In one embodiment, the drug activity gene(s) used in the comparison can be selected to have relatively small p-values or large differential expression ratios. In one example, the drug activity genes used in the comparison have p-values (e.g., under an ANOVA analysis) of no greater than 0.05, 0.01, 0.001, 0.0005, 0.0001, or less. In another example, the expression level after or during a drug treatment is increased or decreased by at least 2-fold, 3-fold, 4-fold, 5-fold, or more over the baseline expression level.

[0459] In another embodiment, comparison of the expression profiles is performed electronically, such as by using a computer system. The computer system includes a processor coupled to a memory or storage medium which stores data representing the expression profiles being compared. In one example, the memory or storage medium is readable or rewritable. The stored expression data can be changed, retrieved, or otherwise manipulated. The memory can also store one or more programs capable of causing the processor to compare the expression profiles. In one embodiment, the processor is coupled to a nucleic acid array scanner which sends signals to the processor for analysis.

[0460] In vivo activities of other drugs can be similarly monitored using the drug activities genes of the present invention, as appreciated by those skilled in the art.

[0461] At least a subset of the drug activity genes of the present invention may be used as disease regression indicators. This subset of genes may be responsive to the effect of CCI-779 or other drugs on RCC or other diseases. In one example, CCI-779 or another drug may cause regression of tumors, and the decrease in tumor size or activity may cause a decreased immune response which is reflected in gene expression changes in the peripheral blood cells. Consequently, the drug activity genes of the present invention can be used as molecular markers for monitoring the efficacy of CCI-779 or other drugs for treating RCC or other diseases. In many cases, diseases amendable to the present invention include those whose regression can produce changed immune responses.

[0462] It should be understood that the above-described embodiments and the following examples are given by way of illustration, not limitation. Various changes and modifications within the scope of the present invention will become apparent to those skilled in the art from the present description.

### E. EXAMPLES

### Example 1

### Isolation of RNA and Preparation of Labeled Microarray Targets

[0463] PBMCs from the CCI-779 clinical trials were isolated from whole blood samples (8 mL) and collected into CPT tubes according to the standard procedure. PBMCs were purified over Ficoll gradients, washed two times with PBS and counted. Total RNA was isolated from PBMC pellets using the RNeasy mini kit (Qiagen, Valencia, Calif.). Labeled target for oligonucleotide arrays was prepared using a modification of the procedure described in Lockhart, et al., Nature Biotechnology 14: 1675-80 (1996). 2 μg total RNA was converted to cDNA by priming with an oligo-dT primer containing a T7 DNA polymerase promoter at the 5′ end. The cDNA was used as the template for in vitro transcription using a T7 DNA polymerase kit (Ambion, Woodlands, Tex.) and biotinylated CTP and UTP (Enzo). Labeled cRNA was fragmented in 40 mM Tris-acetate pH 8.0, 100 mM KOAc, 30 mM MgOAc for 35 minutes at 94° C. in a final volume of 40 PI.

### Example 2

### Hybridization to Affymetrix Microarrays and Detection of Fluorescence

[0464] Individual samples were hybridized to HgU95A genechip (Affymetrix). No samples were pooled. 110 RCC patients were involved in the study. Each patient received 25, 75, or 250 mg of CCI-779 once weekly through intravenous infusion. Blood samples were collected immediately before the first CCI-779 infusion, eight weeks after the first infusion, and sixteen weeks after the first infusion.

[0465] 10 μg of labeled target was diluted in 1×MES buffer with 100 μg/ml herring sperm DNA and 50 μg/ml acetylated BSA. To normalize arrays to each other and to estimate the sensitivity of the oligonucleotide arrays, in vitro synthesized transcripts of 11 bacterial genes were included in each hybridization reaction as described in Hill et al., Science, 290: 809-812 (2000). The abundance of these transcripts ranged from 1:300,000 (3 ppm) to 1:1000 (1000 ppm) stated in terms of the number of control transcripts per total transcripts. As determined by the signal response from these control transcripts, the sensitivity of detection of the arrays ranged between about 1:300,000 and 1:100,000 copies/million. Labeled probes were denatured at 99° C. for 5 minutes and then 45° C. for 5 minutes, and hybridized to oligonucleotide arrays comprised of over 12,500 human gene probes (HgU95A, Affymetrix). Arrays were hybridized for 16 hours at 45° C. The hybridization buffer was comprised of 100 mM MES, 1 M [Na⁺], 20 MM EDTA, and 0.01% Tween 20. After hybridization, the cartridges were washed extensively with non-stringent wash buffer (6×SSPET), such as three 1.0-minute washes at room temperature. These hybridization and wash conditions are herein collectively referred to as “nucleic acid array hybridization conditions.” The washed cartridges were then stained with phycoerythrin coupled to streptavidin.

[0466] 12×MES stock contains 1.22 M MES and 0.89 M [Na+]. For 1000 ml, the stock can be prepared by mixing 70.4 g MES free acid monohydrate, 193.3 g MES sodium salt and 800 ml of molecular biology grade water, and adjusting volume to 1000 ml. The pH should be between 6.5 and 6.7.2×hybridization buffer can be prepared by mixing 8.3 mL of 12×MES stock, 17.7 mL of 5 M NaCl, 4.0 mL of 0.5 M EDTA,0.1 mL of 10% Tween 20 and 19.9 mL of water. 6×SSPET contains 0.9 M NaCl, 60 mM NaH₂PO₄, 6 mM EDTA, pH 7.4, and 0.005% Triton X-100. In some cases, the wash buffer can be replaced with a more stringent wash buffer. 1000 ml stringent wash buffer can be prepared by mixing 83.3 mL of 12×MES stock, 5.2 mL of 5 M NaCl, 1.0 mL of 10% Tween 20 and 910.5 mL of water.

### Example 3

### Gene Expression Data Analysis

[0467] Data analysis was performed on raw fluorescent intensity values using GENECHIP 3.2 software (Affymetrix). GeneChip 3.2 software uses an algorithm to calculate the likelihood as to whether a gene is “absent” or “present” as well as a specific hybridization intensity value or “average difference” for each transcript represented on the array. The algorithms used in these calculations are described in the Affymetrix GeneChip Analysis Suite User Guide (Affymetrix). The “average difference” for each transcript was normalized to “frequency” values according to the procedures of Hill et al., Science, 290: 809-812 (2000). This was accomplished by referring the average difference values on each chip to a calibration curve constructed from the average difference values for the 11 control transcripts with known abundance that were spiked into each hybridization solution. This process also served to normalize between arrays.

[0468] Specific transcripts were evaluated further if they met the following criteria. First, genes that were designated “absent” by the GENECHIP 3.2 software in all samples were excluded from the analysis. Second, in comparisons of transcript levels between arrays, a gene was required to be present in at least one of the arrays. Third, for comparisons of transcript levels between groups, an ANOVA was applied to identify a subset of transcripts that had a significant (p<0.05) differences in frequency values.

[0469] A ANOVA was used to compare PBMC expression profiles measured immediately before the first infusion of CCI-779, to PBMC expression profiles measured at eight and sixteen weeks after the first infusion. In the comparisons, a p value <0.05 was used to indicate statistical significance. Transcripts that were altered, on average, by 2-fold or more between any two time points can be selected.

### Example 4

### Ex Vivo Assays

[0470] Drug modulable transcripts in the surrogate tissue, such as peripheral blood, can provide early evidence of drug exposure in vivo. PBMC ex vivo assays that mimic peripheral blood gene expression in disease states as well as the in vivo response to drug treatments can further validate the surrogate markers identified in in vivo studies. In addition, ex vivo assays that overlay with disease-associated biomarkers may provide evidence for markers of drug-dependent disease amelioration.

[0471] Many factors should be considered in designing suitable ex vivo assays. These factors include, but are not limited to, PBMC seeding density, culture media and other conditions, vehicle control, dose response, time course, and dose schedule (e.g., preincubation, coincubation, or postincubation).

[0472] In one embodiment, phytohemagglutinin (PHA) was used to stimulate gene expression in PBMCs. The genes whose expression can be stimulated by PHA in PBMCs had a substantial overlap with disease-associated transcripts in RCC PBMCs that appear to result from T-cell activation. In some cases, PHA-stimulated PBMCs mimicked anti-CD3/anti-CD28 stimulated T-cell profiles in BioExpress. In addition, CCI-779 inhibited certain PHA-inducible transcripts in a dose-dependent manner. The inhibition by CCI-779 appeared to be specific, rather than global. In one example, CTSL, SCYA2, FABP5, SCYA7, ATP2B1, and IL1R1 genes were directly repressed by 300 nm CCI-779 in PHA-stimulated PBMCs in an ex vivo assay. Databases of disease-associated profiles and ex vivo activation signatures can be created to identity most appropriate culture conditions for identification of drug modulated biomarkers in specific disease settings.

[0473] The foregoing description of the present invention provides illustration and description, but is not intended to be exhaustive or to limit the invention to the precise one disclosed. Modifications and variations are possible consistent with the above teachings or may be acquired from practice of the invention. Thus, it is noted that the scope of the invention is defined by the claims and their equivalents.

What is claimed is:

1. A method comprising comparing an expression profile of at least one gene in a peripheral blood sample of a patient to a reference expression profile of said at least one gene, wherein said at least one gene is differentially expressed in peripheral blood mononuclear cells (PBMCs) of patients who have a non-blood disease and are subject to a drug therapy as compared to PBMCs isolated from said patients before said drug therapy, and wherein the patient has the non-blood disease and is being treated by said drug therapy.

2. The method according to claim 1, wherein said drug therapy is a CCI-779 therapy.

3. The method according to claim 2, wherein the non-blood disease is a solid tumor.

4. The method according to claim 3, wherein the solid tumor is RCC.

5. The method according to claim 2, wherein said at least one gene includes one or more genes selected from Table 5.

6. The method according to claim 2, wherein said at least one gene includes at least two genes selected from Table 5.

7. The method according to claim 1, wherein the peripheral blood sample is a whole blood sample.

8. The method according to claim 1, wherein the peripheral blood sample comprises enriched PBMCs.

9. The method according to claim 1, wherein the expression profile is determined by RT-PCR or immunoassays.

10. The method according to claim 1, wherein the reference expression profile is an average expression profile of said at least one gene in peripheral blood samples isolated from said patients before said drug therapy.

11. The method according to claim 1, wherein the reference expression profile is an expression profile of said at least one gene in a reference peripheral blood sample isolated from the patient before said drug therapy.

12. The method according to claim 1, wherein said at least one gene includes one or more genes which are over-expressed or under-expressed in PBMCs of patients who have the non-blood disease as compared to PBMCs of humans who do not have the non-blood disease, and wherein said drug therapy is capable of down-regulating or up-regulating expression of said one or more genes in PBMCs of patients who have the non-blood disease.

13. The method according to claim 1, wherein said at least one gene includes one or more genes whose expression in PBMCs is capable of being increased or reduced by a phytohemagglutinin treatment, and wherein said drug therapy is capable of down-regulating or up-regulating expression of said one or more genes in phytohemagglutinin-treated PBMCs.

14. The method according to claim 1, wherein RNA transcripts of said at least one gene are capable of hybridizing under stringent or nucleic acid array hybridization conditions to one or more qualifiers selected from the Qualifier Table.

15. The method according to claim 14, wherein said drug therapy is a CCI-779 therapy.

16. The method according to claim 15, wherein the non-blood disease is RCC.

17. A method for identifying drug activity genes, comprising:
detecting an expression profile of genes in peripheral blood samples of patients who have a non-blood disease and are subject to a drug therapy; and
comparing said expression profile to a baseline expression profile of said genes in peripheral blood samples isolated from said patients before said drug therapy so as to identify drug activity genes whose expression levels in peripheral blood samples can be modulated by said drug therapy.

18. A kit comprising a plurality of polynucleotides, wherein each of said polynucleotides is capable of hybridizing under stringent or nucleic acid array hybridization conditions to an RNA transcript, or the complement thereof, of a different respective gene selected from Table 5.

19. A kit comprising a plurality of antibodies, wherein each of said antibodies is capable of binding to a polypeptide encoded by a different respective gene selected from Table 5.

20. A nucleic acid array comprising polynucleotide probes, wherein a substantial portion of all polypeptide probes on the nucleic acid array can hybridize under stringent or nucleic acid array hybridization conditions to RNA transcripts, or the complements thereof, of genes selected from Table 5.

The application's sequence listing, which the Patent Office published only in electronic form, follows.

SEQUENCE LISTING (5278 sequences)

SEQ ID NO: 1 - DNA, 2405 bp, Homo sapiens
gggggaggtgggcaagcggcgaaatggcgccctccgggagtcttgcagttcccctggcagtcctggtgctgttgctttggggtgctccctggacgcacgggcggcggagcaacgttcgcgtcatcacggacgagaactggagagaactgctggaaggagactggatgatagaattttatgccccgtggtgccctgcttgtcaaaatcttcaaccggaatgggaaagttttgctgaatggggagaagatcttgaggttaatattgcgaaagtagatgtcacagagcagccaggactgagtggacggtttatcataactgctcttcctactatttatcattgtaaagatggtgaatttaggcgctatcagggtccaaggactaagaaggacttcataaactttataagtgataaagagtggaagagtattgagcccgtttcatcatggtttggtccaggttctgttctgatgagtagtatgtcagcactctttcagctatctatgtggatcaggacttgccataactactttattgaagaccttggattgccagtgtggggatcatatactgtttttgctttagcaactctgttttccggactgttattaggactctgtatgatatttgtggcagattgcctttgtccttcaaaaaggcgcagaccacagccgtacccatacccttcaaaaaaattattatcagaatctgcacaacctttgaaaaaagtggaggaggaacaagaggcggatgaagaagatgtttcagaagaagaagctgaaagtaaagaaggaacaaacaaagactttccacagaatgccataagacaacgctctctgggtccatcattggccacagataaatcctagttaaattttatagttatcttaatattatgattttgataaaaacagaagattgatcattttgtttggtttgaagtgaactgtgacttttttgaatattgcagggttcagtctagattgtcattaaattgaagagtctacattcagaacataaaagcactaggtatacaagtttgaaatatgatttaagcacagtatgatggtttaaatagttctctaatttttgaaaaatcgtgccaagcaataagatttatgtatatttgtttaataataacctatttcaagtctgagttttgaaaatttacatttcccaagtattgcattattgaggtatttaagaagattattttagagaaaaatatttctcatttgatataatttttctctgtttcactgtgtgaaaaaaagaagatatttcccataaatgggaagtttgcccattgtctcaagaaatgtgtatttcagtgacaatttcgtggtctttttagaggtatattccaaaatttccttgtatttttaggttatgcaactaataaaaactaccttacattaattaattacagttttctacacatggtaatacaggatatgctactgatttaggaagtttttaagttcatggtattctcttgattccaacaaagtttgattttctcttgtatttttcttacttactatgggttacattttttatttttcaaattggatgataatttcttggaaacattttttatgttttagtaaacagtattttcttgttgtttcaaactgaagtttactgagagatccatcaaattgaacaatctgttgtaatttaaaattttggccacttttttcagattttacatcattcttgctgaacttcaacttgaaattgtttttttttttttttctttttggatgtgaaggtgaacattcctgatttttgtctgatgtgaaaaagccttggtattttacattttgaaaattcaaagaagcttaatataaaagtttgcattctactcaggaaaaagcatcttcttgtatatgtcttaaatgtatttttgtcctcatatacagaaagttcttaattgattttacagtctgtaatgcttgatgttttaaaataataacacttttatattttttaaaagacaaacatcatattatcctgtgttctttcctgactggtaatattgtgtgggatttcacaggtaaaagtcagtaggatggaacattttagtgtatttttactccttaaagagctagaatacatagttttcaccttaaaagaagggggaaaatcataaatacaatgaatcaactgaccattacgtagtagacaatttctgtaatgtccccttctttctaggctctgttgctgtgtgaatccattagatttacagtatcgtaatatacaagttttctttaaagccctctcctttagaatttaaaatattgtaccattgaagagttcggatgtgtaacttgtgatgccttagaaaaatatcctaagcacaaaataaacctttctaaccacttcaaaaaaaaaaaaaaaaaaac

SEQ ID NO: 2 - DNA, 1811 bp, Homo sapiens
ggtttgtgtagagaggcgtgcagagcccgttgtccggagtgcacctgctgcctgttctgtccctcccgggagcccccgccgctgtcgccgtcgagtcgccatggaagtgcagaaagaggcacagcgcatcatgaccctgtcggtgtggaagatgtatcactcccgcatgcagcgcggtggcctgcggctgcaccggagtctgcagctgtcgctggtcatgcgcagcgcccgggagctctacctctcggccaaggtggaggccctcgagcccgaggtgtcgttgccggccgccctcccctctgaccctcgcctgcacccgccccgagaagccgagtccacggccgagacagcgacccccgacggtgagcacccgtttccggagccaatggacacgcaggaggcgccgacagccgaggagacctccgcctgctgtgccccgcgccccgccaaagtcagccgcaaacgacgcagcagcagcctgagcgacggcggggacgttggactggtcccgagcaagaaagcccgtctggaagaaaaggaagaagaggagggagcgtcatccgaagtcgccgatcgcctgcagccccctccgggccaagcggagggcgcctttcccaacctggcccgcgtcctgcagaggcgcttctccggcctcctgaactgcagccccgcggcccctccgacggcgccgcccgcgtgcgaggcaaagcccgcttgccgcccggcggacagcatgctcaacgtgctcgtgcgggccgtggtggccttctgaggaccccgagcggcgctgccggagcccagagcgcgcgtcgaaccgtcggcccgagggcgcagacctgaggcgaggccacccccctccatcctgggggaagcgcccgcgaaaaccgtggagagaagccgccgcccgggctgctgagaggcccggagaggactctgtccccggggagccatcgccttcagtgtgcagggacggcaccgaggagtctgagccgggcgcgggcgccttccgcagagacctgcgcccacaggtgctgtcttagtggactgggacgtgaacctttcgctctccttctggactgggagaagggaggcttgggtgttgtgttttttgttttgtttgtttgtttgtttttaaagatctcctcagggtcggacttcattttgtactgtgggctgtgctggccctttcaaggtttttcaagagttggttttgcgtttccaacctcggagaattccaggcactccccttccccctccgctgacatacttgtataagcggtcatcgttgcgtcatggggcaggcgtggggagcttcctgtcgccttggctgggtgtgggcctggaggaaggtcctggggcgtgcactcgcctgggcagtggggaggagagtggcctgagttacttcacccccgcgtgctgctggttaatgtcccgcgtctctgcaccttcgggtgggagcggggactgatctactttcacattctcaagtttttctcatctgcattagaggtccccagtaggttcccaggttccagcgtgcccctccctcagacacacggacacaatcagccgagaagttcctggtctgaatcacgagaatgtggaggggtggggggtgtcagtggaaaggcataaggctgagctgagaccagttgctggtgaaactgggccaatctggggaggggaacatccttgccagggagtttctgagggtctgctttgtttacctttcgtgcggtggattctttttaactccgtctacctggcgttttgttagaaatgtcagataggaaaataaaaaccatttgagt

SEQ ID NO: 3 - DNA, 793 bp, Homo sapiens
ggagccgcggtccggacggcagcgcgtgccccgagctctccgcctccccccgcccgccagccgaggcagctcgagcccagtccgcggccccagcagcagcgccgagagcagccccagtagcagcgccatggccgggtggaacgcctacatcgacaacctcatggcggacgggacctgtcaggacgcggccatcgtgggctacaaggactcgccctccgtctgggccgccgtccccgggaaaacgttcgtcaacatcacgccagctgaggtgggtgtcctggttggcaaagaccggtcaagtttttacgtgaatgggctgacacttgggggccagaaatgttcggtgatccgggactcactgctgcaggatggggaatttagcatggatcttcgtaccaagagcaccggtggggcccccaccttcaatgtcactgtcaccaagactgacaagacgctagtcctgctgatgggcaaagaaggtgtccacggtggtttgatcaacaagaaatgttatgaaatggcctcccaccttcggcgttcccagtactgacctcgtctgtcccttccccttcaccgctccccacagctttgcacccctttcctccccatacacacacaaaccattttattttttgggccattaccccataccccttattgctgccaaaaccacatgggctgggggccagggctggatggacagacacctccccctacccatatccctcccgtgtgtggttggaaaacttttgttttttggggttttttttttctgaataaaaaagattctact

SEQ ID NO: 4 - DNA, 502 bp, Homo sapiens
ttttttttttttttttttttttttttttttttgcatttgcaaagggacactttatttcttgttaagggtgacagcctgcaaggtagccatccagcagcctgggaagagcagcctctggttaacaccagagacagacatttaggagcaggaggggtttgggcaggagctttatgctgaagaggttggctaaacatacatattcaacaggctacaggaggagctatgaatattcatgtaggtggttgcagtccatgcttattgaacaaacatgtgtggaacatatgatcccagcaatatttaaaatcttcatagtccatgatctccacagcgaccccttcctgactcaggctgcggcgccctcctggtaacatggatactggaagtagtagaggcgggcggtgaagatggtgagattcacgttgctgtgcctggccaggaactcggccacctcccctgcacagtctgggcaagggctccaagatgtgtaccaggtgacctggta

SEQ ID NO: 5 - DNA, 1015 bp, Homo sapiens
tgattggtcaggcacggagcaggaggcgggctgatagcccagcagcagcagcggcggcggcggctgcggagcgggtgtgaggcggctggaccgcgctgcaggcatccgcgggcgcggcaagatggaggtgacgggggtgtcggcaccacggtgaccgttttcatcagcagctccctcagcaccttccgctccgagaagcgatacagccgcagcctcaccatcgctgagttcaagtgtaaactggagttgctggtgggcagccctgcttcctgcatggaactggagctgtatggagttgacgacaagttctacagcaagctggatcaagaggatgcgctcctgggctcctaccctgtagatgacggctgccgcatccacgtcattgaccacagtggcgcccgccttggtgagtatgaggacgtgtcccgggtggagaagtacacgatctcacaagaagcctacgaccagaggcaagacacggtccgctctttcctgaagcgcagcaagctcggccggtacaacgaggaggagcgggctcagcaggaggccgaggccgcccagcgcctggccgaggagaaggcccaggccagctccatccccgtgggcagccgctgtgaggtgcgggcggcgggacaatcccctcgccggggcaccgtcatgtatgtaggtctcacagatttcaagcctggctactggattggtgtccgctatgatgagccactggggaaaaatgatggcagtgtgaatgggaaacgctacttcgaatgccaggccaagtatggcgcctttgtcaagccagcagtcgtgacggtgggggacttcccggaggaggactacgggttggacgagatatgacacctaaggaattcccctgcttcagctcctagctcagccactgactgcccctcctgtgtgtgcccatggcccttttctcctgaccccattttaattttattcattttttcctttgccattgatttttgagactcatgcattaaattcactagaaacccag

SEQ ID NO: 6 - DNA, 1484 bp, Homo sapiens
  misc_feature (317)..(1073): Each "n" represents a nucleotide selected from a, t, g or c, or contains no nucleotide.
atttttatattatttatttattcttcgttagtttgtttttggagcgtgggttttgttttgttttttgatttttttctttttttccgacccacggatttattcttattgcccaggcttgaagtgcaatggcgtgttctcagcttactcaacctccgcctcttgggtttgggtaattgttgtgcctcggcctccctctgcctcttgggcttgggcgattgttccacctcatccgccctccgcctcttgggtttcggtgattgttccacctcatccaccctccacctcttggggtttggggtgggtttttccgcctcggncctcctgagtagctaagggaggagtcttgagattatcatccactgagggtggaagaggagagggtggaagagggacaaagagacagtccttcagattatcatccactgagggtggaagaggagagggtggaagagggaccaggagacactccttcagattatcatccactgagggtggaagaggagcaagaggacactccttgatattatcatccactgagggtggaaggggatgaaggagacattcgggaggtgtcttgaggctcagggagttatcagttatagaatgttgttgagttggaggaggtggctggcggcccatcctgttttttaaagtttcagctgtgaggtagggccagcagggcaatcctgaagaatgatgatgctccgctgccgccattctgacctgtagggccgaagaagggaatgttttcacacatattcatttgatggacaaaattaccgccaccaacacggtctgcaccttctgttgctggtgatagatttnngcacctttccatcctccaggtttcaaaatagnagtatcagtgtcataatatcacccttccactgagtactgccgacagntggggagtaaagaaaagtcattgggacacactgttgtctccacatgccactgtgtctgtctgcaaatgtaggnaggctggggtcctgccccagggaagacagagtcataacagagtaataaagaggcatgtntgagacacaggagtgtctatgtctatcctcattcctccctcacagccatcaccagagcatgtttcttgcaccaggtcaacagacagtaagagaggcatgaaaagcccattgtccacacatgttgcagcttctttttggagaatgttttccaggccttttatgttctgtctctgattctcggaactctgcaaggtcagtgtgaccaccctgctccaaatctaagaaaacagaggttaccagaggaaggagaaattgtgcccggggtcacacagcttgcaagaggcagagtggaagttgattccagctctgcctgcaggaccctctcatttcccctgtttcccttcttgataaaggatcttcttcactctggaggtgccacccatgagaacaaagagctctgcagagatgtggattcctgaagagctgcaggggaactgggagagggtt

SEQ ID NO: 7 - DNA, 1659 bp, Homo sapiens
tcagcgggcgagtccccggctcctccagctccttcctcctcttcctcctcctcctccacctccggcttttgggggatcactgtcctctctcggcagcagaatgagccggcaggtggtccgctccagcaagttccgccacgtgtttggacagccggccaaggccgaccagtgctatgaagatgtgcgcgtctcacagaccacctgggacagtggcttctgtgctgtcaaccctaagtttgtggccctgatctgtgaggccagcgggggaggggccttcctggtgctgcccctgggcaagactggacgtgtggacaagaatgcgcccacggtctgtggccacacagcccctgtgctagacatcgcctggtgcccgcacaatgacaacgtcattgccagtggctccgaggactgcacagtcatggtgtgggagatcccggatgggggcctgatgctgcccctgcgggagcccgtcgtcaccctggagggccacaccaagcgtgtgggcattgtggcctggcacaccacagcccagaacgtgctgctcagtgcaggttgtgacaacgtgatcatggtgtgggacgtgggcactggggcggccatgctgacactgggcccagaggtgcacccagacacgatctacagtgtggactggagccgagatggaggcctcatttgtacctcctgccgtgacaagcgcgtgcgcatcatcgagccccgcaaaggcactgtcgtagctgagaaggaccgtccccacgaggggacccggcccgtgcgtgcagtgttcgtgtcggaggggaagatcctgaccacgggcttcagccgcatgagtgagcggcaggtggcgctgtgggacacaaagcacctggaggagccgctgtccctgcaggagctggacaccagcagcggtgtcctgctgcccttctttgaccctgacaccaacatcgtctacctctgtggcaagggtgacagctcaatccggtactttgagatcacttccgaggcccctttcctgcactatctctccatgttcagttccaaggagtcccagcggggcatgggctacatgcccaaacgtggcctggaggtgaacaagtgtgagatcgccaggttctacaagctgcacgagcggaggtgtgagcccattgccatgacagtgcctcgaaagtcggacctgttccaggaggacctgtacccacccaccgcagggcccgaccctgccctcacggctgaggagtggctggggggtcgggatgctgggcccctcctcatctccctcaaggatggctacgtacccccaaagagccgggagctgagggtcaaccggggcctggacaccgggcgcaggagggcagcaccagaggccagtggcactcccagctcggatgccgtgtctcggctggaggaggagatgcggaagctccaggccacggtgcaggagctccagaagcgcttggacaggctggaggagacagtccaggccaagtagagccccgcagggcctccagcagggtcagccattcacacccatccactcacctcccattcccagccacatggcagagaaaaaaatcataataaaatggctttattttctggtaaaaaaaaaaaaaaaaaaaaaaaaaaaaaaaaaaaaaaaaaaaaaaaaaaagggggggggga

SEQ ID NO: 8 - DNA, 1980 bp, Homo sapiens
  misc_feature (5)..(5): Each "n" represents a nucleotide selected from a, t, g or c, or contains no nucleotide.
ttttntccaggtgagtaagatagaggggagaagtgggaccagggagttccaggtctgtgaacggccctggctgaggagctggatcatgaaatctgagtcaagtaagaaggaaattgaggacacgagttgggtattgcatagtgttactgtgttaaggtcaggggtcaaagacttactggcatggagtaaccagagtaagtgagctggaaagatgagttatcagggcagagaggggtgcttggaattgaggctttggagctgtgaaagtgacaagatgcaggtattaccatgggagtcggcagctgaggtggggtaaaggagatgctctgtggaagggagatgaaggcactgaagtcagccagaaacacaaaaactggtggtggtgagtgagcagagtggcagtgagccccaagcttccagttttctccttggacagtcatcgttaattattattattattttttgagatggagtttccctcttattgccaggctggagtgcaatggtgcaatctcagctcactgcaacctccgctcctggttcaatggttctcctgcctcagcctcccaagtagctgcaattaggcgcccaccaccacgcccagctaatttgtatttagtagagatgggtttcaccatgttggccaggctggtctttgaagtcctgacctcaggtgatccacccgccttggcctcccaaagtaatcacgctgggattacaagcgtgagccactgtgccaggccaagtcatagtaattatgagatgtggatcactggtactgggtacttactgtactgcaggcactgacccacacaagttgtattggttatctcatttaaccctgaccaccctgaggtagggaggtgtccacactgtaaaatgaagaaacagaggctcagaaagttagttgccctgacatcacaaagctggtaagtggaagggccaggatttaccctggcgcccagagcgtgatttgtattctgcataccatttccttaatttctgagccttagttccccttttacctataggtatagcaccaagtcccatcacagagtagaaacctgttaaacgttaattttccttgccttcctcaggtttccctaatgtgggaaagtcctcgctgatcaatgggctggtggggcggaaagtcgtgagtgtctccagaaccccgggccataccgaatactttcagacctactttcttaccccctctgtgaagctctgtgactgcccaggcctcatcttcccatctcttctgcctaggcagttgcaggttctggcggggatctaccctatcgcccagatccaggagccctacactgctgtgggctacctggcctcccgaattcccgtgcaggccctgctccacctgcgccacccagaggctgaggaccctcagcggaacacccctggtgtgcctgggacatctgtgaaggtgagttccatgtgcctggcttcgccccacctggtttcagctgctcttccttacctgctcgccttttacccttccctgtctcctttcctctcctcagagattctgccattgatgaagctgctgtccactcacccctagatttttgttgcatagccagtaagatctctggcctggaatgttttggggaaaactggaaggactgtgttatgggagtggagtataactggtaactggttaatgctttcccctttccattattctttttcttcctccagcctgggcagagatacgtggttacaagacagccaaggcggctcggaatgatgtgtacagagcagccaacagtctcttgcggctggcagtggacggccgcctcagcctgtgtttcatccctccaggctacagtgaacagaaaggcacttgggagtcccaaccctgtaaaatccagctctgcccattcagcactgctcctgggcagctgactgtggctaagaaaagatgtaccactgtgctcactctttacaacacatgcaagtatctag

SEQ ID NO: 9 - DNA, 1132 bp, Homo sapiens
agccagaaatgtgaagtgctagctgaaggatgagcagcagctagccaggcaaagggggcaatggcggcttcctgtgttctactgcacactgggcagaagatgcctctgattggtctgggtacctggaagagtgagcctggtcaggtaaaagcagctgttaagtatgcccttagcgtaggctaccgccacattgattgtgctgctatctacggcaatgagcctgagattggggaggccctgaaggaggacgtgggaccaggcaaggcggtgcctcgggaggagctgtttgtgacatccaagctgtggaacaccaagcaccaccccgaggatgtggagcctgccctccggaagactctggctgacctccagctggagtatctggacctgtacctgatgcactggccttatgcctttgagcggggagacaaccccttccccaagaatgctgatgggactatatgctacgactccacccactacaaggagacttggaaggctctggaggcactggtggctaaggggctggtgcaggcgctgggcctgtccaacttcaacagtcggcagattgatgacatactcagtgtggcctccgtgcgtccagctgtcttgcaggtggaatgccacccatacttggctcaaaatgagctaattgcccactgccaagcacgtggcttggaggtaactgcttatagccctttgggctcctctgatcgtgcatggcgtgatcctgatgagcctgtcctgctggaggaaccagtagtcctggcattggctgaaaagtatggccgatctccagctcagatcttgctcaggtggcaggtccagcggaaagtgatctgcatccccaaaagtatcactccttctcgaatccttcagaacatcaaggtgtttgacttcacctttagcccagaagagatgaagcagctaaatgccctgaacaaaaattggagatatattgtgcctatgcttacggtggatgggaagagagtcccaagggatgcagggcatcctctgtacccctttaatgacccgtactgagaccacagcttcttggcctcccttccagctctgcagctaatgaggtcctgccacaacggaaagagggagttaataaagccattggagcatccat

SEQ ID NO: 10 - DNA, 1049 bp, Homo sapiens
gcccggtgccaagcgcagctagctcagcaggcggcagcggcggcctgagcttcagggcagccagctcctcccggtctcgccttcctcgcggtcagcatgaaagccttcagtcccgtgaggtccgttaggaaaaacagcctgtcggaccacagcctgggcatctcccggagcaaaacccctgtggacgacccgatgagcctgctatacaacatgaacgactgctactccaagctcaaggagctggtgcccagcatcccccagaacaagaaggtgagcaagatggaaatcctgcagcacgtcatcgactacatcttggacctgcagatcgccctggactcgcatcccactattgtcagcctgcatcaccagagacccgggcagaaccaggcgtccaggacgccgctgaccaccctcaacacggatatcagcatcctgtccttgcaggcttctgaattcccttctgagttaatgtcaaatgacagcaaagcactgtgtggctgaataagcggtgttcatgatttcttttattctttgcacaacaacaacaacaacaaattcacggaatcttttaagtgctgaacttatttttcaaccatttcacaaggaggacaagttgaatggacctttttaaaaagaaaaaaaaaatgaaggaaaactaagaatgatcatcttcccagggttcttacttgactgtaattcgttatttatgaaaaaaccttttaaatgccctttctgcagttggaaggttttctttatatactattcccaccatggggagcgaaaacgttaaaatcacaaggaattgcccaatctaagcagactttgccttttttcaaaggtggagcgtgataccagaaggatccagtattcagtcacttaaatgaagtcttttggtcagaaattacctttttcacacaagcctactgaatgctgtgtatatatttatatataaatatatctatttgagtgaaaccttgtgaacctttaattagagtcttcttgtatagtggcagagatgtctattctgcatcaaagtgtaatgatgtact

SEQ ID NO: 11 - DNA, 1989 bp, Homo sapiens
attcgggcctaggctcatctccacagaggagaacacgcagggagcagagaccatggggcccctctcagcccctccctgcacacagcatataacctggaaagggctcctgctcacagcatcacttttaaacttctggaacccgcccaccacagcccaagtcacgattgaagcccagccaccaaaagtttctgaggggaaggatgttcttctacttgtccacaatttgccccagaatcttactggctacatctggtacaaaggacaaatcagggacctctaccattatgttacatcatatgtagtagacggtcaaataattaaatatgggcctgcatacagtggacgagaaacagtatattccaatgcatccctgctgatccagaatgtcacccaggaagacacaggatcctacactttacacatcataaagcgaggtgatgggactggaggagtaactggacgtttcaccttcaccttatacctggagactcccaaaccctccatctccagcagcaatttcaaccccagggaggccacggaggctgtgatcttaacctgtgatcctgagactccagatgcaagctacctgtggtggatgaatggtcagagcctccctatgactcacagcttgcagctgtctgaaaccaacaggaccctctacctatttggtgtcacaaactatactgcaggaccctatgaatgtgaaatacggaacccagtgagtgccagccgcagtgacccagtcaccctgaatctcctcccgaagctgcccaagccctacatcaccatcaataacttaaaccccagggagaataaggatgtctcaaccttcacctgtgaacctaagagtgagaactacacctacatttggtggctaaatggtcagagcctcccggtcagtcccagggtaaagcgacgcattgaaaacaggatcctcattctacccagtgtcacgagaaatgaaacaggaccctatcaatgtgaaatacgggaccgatatggtggcatccgcagtgacccagtcaccctgaatgtcctctatggtccagacctccccagaatttacccttcgttcacctattaccattcaggacaaaacctctacttgtcctgctttgcggactctaacccaccggcacagtattcttggacaattaatgggaagtttcagctatcaggacaaaagctttctatcccccagattactacaaagcatagcgggctctatgcttgctctgttcgtaactcagccactggcaaggaaagctccaaatccgtgacagtcagagtctctgactggacattaccctgaattctactagttcctccaattccatcttctcccatggaacctcaaagagcaagacccactctgttccagaagccctataagtcagagttggacaactcaatgtaaatttcatgggaaaatccttgtacctgatgtctgagccactcagaactcaccaaaatgttcaacaccataacaacagctgctcaaactgtaaacaaggaaaacaagttgatgacttcacactgtggacagtttttcccaagatgtcagaataagactccccatcatgatgaggctctcacccctcttagctgtccttgcttgtgcctgcctctttcacttggcaggataatgcagtcattagaatttcacatgtagtataggagcttctgagggtaacaacagagtgtcagatatgtcatctcaacctcaaacttttacataacatctcaggaggaaatgtggctctctccatcttgcatacagggctcccaatagaaatgaacacagagatattgcctgtgtgtttgcagagaagatggtttctataaagagtaggaaagctgaaattatagtagagtcccctttaaatgcacattgtgtggatggctctcaccatttcctaagagatacattgtaaaacgtgacagtaagactgattctagcagaataaaacatgtactacatttgctaaa

SEQ ID NO: 12 - DNA, 1751 bp, Homo sapiens
ccagcgttagcccgcggccaggcagccgggaggagcggcgcgcgctcggacctctcccgccctgctcgttcgctctccagcttgggatggccggctacctgcgggtcgtgcgctcgctctgcagagcctcaggctcgcggccggcctgggcgccggcggccctgacagcccccacctcgcaagagcatccgcggcgccactatgccgacaaaaggatcaaggtggcgaagcccgtggtggagatggatggtgatgagatgacccgtattatctggcagttcatcaaggagaagctcatcctgccccacgtggacatccagctaaagtattttgacctcgggctcccaaaccgtgaccagactgatgaccaggtcaccattgactctgcactggccacccagaagtacagtgtggctgtcaagtgtgccaccatcacccctgatgaggcccgtgtggaagagttcaagctgaagaagatgtggaaaagtcccaatggaactatccggaacatcctgggggggactgtcttccgggagcccatcatctgcaaaaacatcccacgcctagtccctggctggaccaagcccatcaccattggcaggcacgcccatggcgaccagtacaaggccacagactttgtggcagaccgggccggcactttcaaaatggtcttcaccccaaaagatggcagtggtgtcaaggagtgggaagtgtacaactttcccgcaggcggcgtgggcatgggcatgtacaacaccgacgagtccatctcaggttttgcgcacagctgcttccagtatgccatccagaagaaatggccgctgtacatgagcaccaagaacaccatactgaaagcctacgatgggcgtttcaaggacatcttccaggagatctttgacaagcactataagaccgacttcgacaagaataagatctggtatgagcaccggctcattgatgacatggtggctcaggtcctcaagtcttcgggtggctttgtgtgggcctgcaagaactatgacggagatgtgcagtcagacatcctggcccagggctttggctcccttggcctgatgacgtccgtcctggtctgccctgatgggaagacgattgaggctgaggccgctcatgggaccgtcacccgccactatcgggagcaccagaagggccggcccaccagcaccaaccccatcgccagcatctttgcctggacacgtggcctggagcaccgggggaagctggatgggaaccaagacctcatcaggtttgcccagatgctggagaaggtgtgcgtggagacggtggagagtggagccatgaccaaggacctggcgggctgcattcacggcctcagcaatgtgaagctgaacgagcacttcctgaacaccatggacttcctcgacaccatcaagagcaacctggacagagccctgggcaggcagtagggggaggcgccacccatggctgcagtggaggggccagggctgagccggcgggtcctcctgagcgcggcagagggtgagcctcacagcccctctctggaggcctttctaggggatgtttttttataagccagatgtttttaaaagcatatgtgtgtttcccctcatggtgacgtgaggcaggagcagtgcgttttacctcagccagtcagtatgttttgcatactgtaatttatattgcccttggaacacatggtgccatatttagctactaaaaagctcttcacaaaaaaaaaaacggattccgcg

SEQ ID NO: 13 - DNA, 688 bp, Homo sapiens
  misc_feature (665)..(665): Each "n" represents a nucleotide selected from a, t, g or c, or contains no nucleotide.
tttttcgtaatcaactactttatgtgaagaaaaaaggcattgttaacaatggctcaaaactgttcttgcaacacgtgaggcagcctcagtcccgcttctagctggcgaaggccttgccggcatcctccttgcctctgtaccttctcttcccatgtgtgaacgggatgtaccggtacttaatcatgtgcttgatttgcctcttcatcgtgatacagaagagcatgatgaagtacatcaccagaatcggccagaacaccgggacgttgaaagcgtcgaagaaagtacagaccatagccacaaggatgcccttggtagccgcatgccaaaatttaaactctgggagccttcgaatgaaggggcggaattcctcgttctgtttggtgggtagcgaaggaccgtcatctgagtcttccattaaggaaggatccactttgggagaaagaaaagctatgaaaagatttagatggtagatccccaaggcataggtcacaatgtaccaaccctgcagcaggtaaactcgaatcatgtagacaaagctcaggcccagtgtcacgacccatcgcacagccgtgtagggtgtggacttgtctagccaggactgataaatctgtccaagtcttgtgaaaaatctgtacaccaaccgaagtttcccatggacggattcntccacactgtccccttcagacat

SEQ ID NO: 14 - DNA, 1307 bp, Homo sapiens
agggccactacacagagggagccgagctggtcgactcggtcctggatgtggtgaggaaggagtcagagagctgtgactgtctccagggcttccagctgacccactctctggggggcggcacggggtccgggatgggcaccctgctcatcagcaagatccgggaagagtacccagaccgcatcatgaacaccttcagcgtcatgccctcacccaaggtgtcagacacggtggtggagccctacaacgccaccctctcggtccaccagctggtggaaaacacagatgaaacctactgcattgacaacgaggccctgtatgacatctgcttccgcaccctgaagctgaccacccccacctacggggacctcaaccacctggtgtcggccaccatgagcggggtcaccacctgcctgcgcttcccgggccagctgaacgcagacctgcgcaagctggcggtgaacatggtgcccttccctcgcctgcacttcttcatgcccggcttcgcgcccctgaccagccggggcagccagcagtaccgggcgctcacggtgcccgagctcacccagcagatgttcgactccaagaacatgatggccgcctgcgacccgcgccacggccgctacctgacggtggctgccatcttccggggccgcatgtccatgaaggaggtggacgagcagatgctcaatgtgcagaacaagaacagcagctacttcgtggagtggatccccaacaacgtgaagacggccgtgtgcgacatcccgccccgcggcctgaagatgtcggccaccttcatcggcaacagcacggccatccaggagctgttcaagcgcatctccgagcagttcacggccatgttccggcgcaaggccttcctgcactggtacacgggcgagggcatggacgagatggagttcaccgaggccgagagcaacatgaatgacctggtgtccgagtaccagcagtaccaggacgccacggccgacgaacaaggggagttcgaggaggaggagggcgaggacgaggcgtagatgcccccgcgagacgggttagggaaagcggaggaggaaagcgagggggtggggggcttcccgggacgataacctggcagtggaaggaaagaagcatggtctactttaggtgtgcgctgggtctctggtgctcttcactgttgcctgtcacttttttttccttttttgtaatattgatgacatcaatgtaacatttgagatatttctgaattactgttgtaatggctaaaatcacataaacgtttgtgtcggaaaaaaaaaaaaaaaaaaaaaaaa

SEQ ID NO: 15 - DNA, 973 bp, Homo sapiens
tcccgtggagtggccggcgacaagatggcagcagcgtgtcggagcgtgaagggcctggtggcggtaataaccggaggagcctcgggcctgggcctggccacggcggagcgacttgtggggcagggagcctctgctgtgcttctggacctgcccaactcgggtggggaggcccaagccaagaagttaggaaacaactgcgttttcgccccagccgacgtgacctctgagaaggatgtgcaaacagctctggctctagcaaaaggaaagtttggccgtgtggatgtagctgtcaactgtgcaggcatcgcggtggctagcaagacgtacaacttaaagaagggccagacccataccttggaagacttccagcgagttcttgatgtgaatctcatgggcaccttcaatgtgatccgcctggtggctggtgagatgggccagaatgaaccagaccagggaggccaacgtggggtcatcatcaacactgccagtgtggctgccttcgagggtcaggttggacaagctgcatactctgcttccaaggggggaatagtgggcatgacactgcccattgctcgggatctggctcccataggtatccgggtgatgaccattgccccaggtctgtttggcaccccactgctgaccagcctcccagagaaagtgtgcaacttcttggccagccaagtgcccttccctagccgactgggtgaccctgctgagtatgctcacctcgtacaggccatcatcgagaacccattcctcaatggagaggtcatccggctggatggggccattcgtatgcagccttgaagggagaaggcagagaaaacacacgctcctctgcccttcctttccctggggtactactctccagtcttgggaggaagcccagtagccattttgtaactgcctaccagtcgccctctgtgcctaataaagtctctttttctcacagaaaaaaaaaaaaaaaaaa

SEQ ID NO: 16 - DNA, 1049 bp, Homo sapiens
gtagccatggcggccatgagtttgttgcggcgggtttcggttactgcggtggcagctctgtctggccggccccttggcactcgcctcggatttgggggcttcctcactcgtggctttccgaaggctgctgctcctgttcgacacagtggagaccatgggaaaagactatttgtcatcagaccttctagattctatgacaggcgttttttgaagttattgagattctacattgcattgactgggattccagtagcaattttcataactctggtgaatgtattcattggtcaagctgaactagcagaaattccagaaggctatgtcccagaacactgggaatattataagcatcccatatcaagatggattgcccgtaatttctatgatagtcctgaaaagatatatgaaagaacaatggccgtccttcagattgaagctgaaaaggctgaattacgggtaaaggagctggaagtgcgaaaattgatgcatgtgagaggagatggaccctggtattactatgagacaattgacaaggaacttattgatcattctccgaaagcaactcctgacaattaagcctttttttctccaaatacaaagtatattctctttattggaaaataaattaataaatatattctgtatttttgctctccgtgaaaaacaaaagagcctctgacattactgtctctcagtgttggttcagattgaggcttttgtttgaggagtttggcttccagtccccaaagaaggtttaaaatgtactaataaaaactggagaaataggaatttgtgaacccctaaaattgtagcaactttgaaaggttagtgttttatttacctgacaaatggaagttatagaagtctaataatgttaagcaccagtaattatagtattttgtacaaatgcctgtactgtagatgtctgtattattgaggggcaactcaggattttaagttccataaagtattgaaccaactctaaaatgttaactccttaataaacagattctcagtaaacaaattttaaagttaaaaaaaaaaaaaaa

SEQ ID NO: 17 - DNA, 524 bp, Homo sapiens
atcgcaggcctagactcccgaggcttcctctttggcccctccctggcccaggagcttggactgggctgcgtgctcatccgaaagcgggggaagctgccaggccccactctgtgggcctcctattccctggagtacgggaaggctgagctggagattcagaaagacgccctggagccaggacagagggtggtcgtcgtggatgatctgctggccactggtggaaccatgaacgctgcctgtgagctgctgggccgcctgcaggctgaggtcctggagtgcgtgagcctggtggagctgacctcgcttaagggcagggagaagctggcacctgtacccttcttctctctcctgcagtatgagtgaccacagggcctcccagcccaacatctccagctggatcccagggaaatatcagccttgggcaactgcagtgaccaggggcaccggctgcccacagggaacacattcctttgctggggttcagcgcctctcctggggctggaagtgccaaagcctggggcaaa

SEQ ID NO: 18 - DNA, 828 bp, Homo sapiens
gggggagtgaaagcgaaagcccgggcgactagccgggagaccagagatctagcgactgaagcagcatggccaagccgtgtggggtgcgcctgagcggggaagcccgcaaacaggtggaggtcttcaggcagaatcttttccaggaggctgaggaattcctctacagattcttgccacagaaaatcatatacctgaatcagctcttgcaagaggactccctcaatgtggctgacttgacttccctccgggccccactggacatccccatcccagaccctccacccaaggatgatgagatggaaacagataagcaggagaagaaagaagtccctaagtgtggatttctccctgggaatgagaaagtcctgtccctgcttgccctggttaagccagaagtctggactctcaaagagaaatgcattctggtgattacatggatccaacacctgatccccaagattgaagatggaaatgattttggggtagcaatccaggagaaggtgctggagagggtgaatgccgtcaagaccaaagtggaagctttccagacaaccatttccaagtacttctcagaacgtggggatgctgtggccaaggcctccaaggagactcatgtaatggattaccgggccttggtgcatgagcgagatgaggcagcctatggggagctcagggccatggtgctggacctgagggccttctatgctgagctttatcatatcatcagcagcaacctggagaaaattgtcaccccaaagggtgaagaaaagccatctatgtactgaacccgggactagaaggaaaataaatgatctatatgttgtgtgg

SEQ ID NO: 19 - DNA, 337 bp, Homo sapiens
gatccgtgccagaagcaagcctgtgagatacagaaatgtttacaagccaacagctacatggaatcaaagtgtcaggctgtcatccaagaactgcgtaagtgttgtgctcagtatcccaagggaagatctgtcgtctgttcaggatttgaaaaagaagaggaagaaaacctaacacggaagtctgcatcaaagtaaagttcttctgaagtgctgctccatgtttccaccaaatgaattttttttatcctcctgactcttcaggccaggtagcagcaaatagcaaatgaaaaagtcagctacaaaagttaatgaatatgccatctatgcagaacaggca

SEQ ID NO: 20 - DNA, 288 bp, Homo sapiens
gcaatgaagcttggagatacatgggtggctttgcaaagagtgtttccttttctgatgtattctttaaaggattcaaatggggatttgctgcatttgtggtagctgtaggagctgaatattacctggagtccctgaataaagataagaagcatcactgaagataatacctggaagcatcatagtggtttcttaactctccaaaataagatttcttctctgtagcctacttgtctggtttatcccttacagaatattagtaagatttaatcaattaaaatatatatatat

SEQ ID NO: 21 - DNA, 1575 bp, Homo sapiens
agaaccgcgacctccgcaaccttgagcggcatccgtggagtgcgcctgcagctacgaccgcagcaggaaagcgccgccggccaggcccagctgtggccggacagggactggaagagaggacgcggtcgagtaggtgtgcaccagccctggcaacgagagcgtctaccccgaactctgctggccttgaggtggggaagccggggagggcagttgaggaccccgcggaggcgcgtgactggttgagcgggcaggccagcctccgagccgggtggacacaggttttaaaacatgaatcctacactcatccttgctgccttttgcctgggaattgcctcagctactctaacatttgatcacagtttagaggcacagtggaccaagtggaaggcgatgcacaacagattatacggcatgaatgaagaaggatggaggagagcagtgtgggagaagaacatgaagatgattgaactgcacaatcaggaatacagggaagggaaacacagcttcacaatggccatgaacgcctttggagacatgaccagtgaagaattcaggcaggtgatgaatggctttcaaaaccgtaagcccaggaaggggaaagtgttccaggaacctctgttttatgaggcccccagatctgtggattggagagagaaaggctacgtgactcctgtgaagaatcagggtcagtgtggttcttgttgggcttttagtgctactggtgctcttgaaggacagatgttccggaaaactgggaggcttatctcactgagtgagcagaatctggtagactgctctgggcctcaaggcaatgaaggctgcaatggtggcctaatggattatgctttccagtatgttcaggataatggaggcctggactctgaggaatcctatccatatgaggcaacagaagaatcctgtaagtacaatcccaagtattctgttgctaatgacaccggctttgtggacatccctaagcaggagaaggccctgatgaaggcagttgcaactgtggggcccatttctgttgctattgatgcaggtcatgagtccttcctgttctataaagaaggcatttattttgagccagactgtagcagtgaagacatggatcatggtgtgctggtggttggctacggatttgaaagcacagaatcagataacaataaatattggctggtgaagaacagctggggtgaagaatggggcatgggtggctacgtaaagatggccaaagaccggagaaaccattgtggaattgcctcagcagccagctaccccactgtgtgagctggtggacggtgatgaggaaggacttgactggggatggcgcatgcatgggaggaattcatcttcagtctaccagcccccgctgtgtcggatacacactcgaatcattgaagatccgagtgtgatttgaattctgtgatattttcacactggtaaatgttacctctattttaattactgctataaataggtttatattattgattcacttactgactttgcattttcgtttttaaaaggatgtataaatttttacctgtttaaataaaatttaatttcaaatgt

SEQ ID NO: 22 - DNA, 704 bp, Homo sapiens
  misc_feature (604)..(604): Each "n" represents a nucleotide selected from a, t, g or c, or contains no nucleotide.
gcattgtttttcagctttatttcaaatgctgtgtagcataagaacctagccgtcagacatcattttttagctatgaaaaatatgaaacaaggcatattctaaagtgctgaaggaattaattgccctattagataacgaatacctggaggaatgaacagagtgatttatggcttaaagtgcttgggtctgatcatcatcttagcctctttgaaggaggacttgtagccaccagggtgtgcctcacttacaccaggccaggtaccccagaaaattccattaccgacacctctgtatttttggtgataatatttgccatttaagtttgcagaaagacatgcatcaaaccaccagcctgaactgtagtacagcccacagttcccagaaggatatcgatcattgtctttatctggagtggtgaaaaacttcagatcgtggttgtaatgtttgttgaaacgtaatgcatctccagctgtgccattatagttaccaacgtgtaaacgatatttgagaaactcattagccacataaaactgatcatacaaggcatatagttcgacaccattaaagtcttcagatctattctcagaatcatttccttactctnggtcagaagatgaattttatcgttccccagcccaaaatccctttctgaggtcccaaagccttgctttgtagctttgcatggttcttgtgaagtgtgctcc

SEQ ID NO: 23 - DNA, 691 bp, Homo sapiens
  misc_feature (2)..(689): Each "n" represents a nucleotide selected from a, t, g or c, or contains no nucleotide.
tnctctgcagtgtcatacaggagggttggagagaggcatccttttccctaggctgtgcctgggggacaagagagaggggaagtacagctggcactgccgtgccaggggcagggtccaggccagccgtgccacctgagcgggcacagcgagctggagctcggctactccttggcgcggccaatgatggtgaggatgtacaggaagatgttgatgatgtctgtgtncaggttcagcgnagnaaacacatactcttctgggctcagggacagntgnttgntccccagcagaagctgggtgtccactgcgaggaagcaggtgaagagcagagngcccagtnaggngtacacgatctccaggatgnggttccggatnaagatncagagantggcgannggatgaagagcaccaccatgctcacccaggagcacgcccatgcatgaggtgacgggtttggcccccggnatcagttggcttncccaggttgantntcaaggggggggnntnncccnannttttnatgncaannnnnnnnnnnnnnnnnnncnnnnnttnnnnttggtcaannnnnnnnnnnnnnncnnnnttnnnnttgncannnnnnnnnnnnnnnnnnnnnnnnnnnnnnnnnnnnnnnnnnnnnnnnnnnnnnnnnnnnnnnnnnnnnnnnnnnnnnnnnnnnnnnnnnnnnntt

SEQ ID NO: 24 - DNA, 1955 bp, Homo sapiens
gaattcaccaagcgttggattgttcacccactaatagggaacgtgagctgggtttagaccgtcgtgagacaggttagttttaccctactgatgatgtgttgttgccatggtaatcctgctcagtacgagaggaaccgcaggttcagacatttggtgtatgtgcttggctgaggagccaatggggcgaacgtaccatctgtgggattatgactgaacgcctctaagtcagaatcccgcccaggcgaacgatacggcagcgccgcggagcctcggttggcctcggatagccggtcccccgcctgtccccgccggcgggccgcccccccctccagcgccccgcgcgcgcgggagggcgcgtgccccgccgcgcgccgggaccggggtccggtgcggagtgcccttcgtcctgggaaacggggcgcggccggaaaggcggccgccccctcgcccgtcacgcaccgcacgttcgtggggaacctggcgctaaaccattcgtagacgacctgcttctgggtcggggtttcgtacgtagcagagcagctccctcgctgcgatctattgaaagtcagccctcgacacaagggtttgtccgcgcgcgcggcggcgtgcgtgcggggggcccggcggggcgtgcgcgtccggcgccgtccgtccttccgttcgtcttcctccctcccggcctctccgccgaccgcgggcgtggtgggggggtgggggggggacgcgcgaccccggtcggcgcgccccgcttcttcggttcccgcctcctccccgttcaccgcggggcggctcgtccgctccgggccgggacggggtccggggagcgtggtttgggagccgcggaggcggccgcgccgagccgggcccgtgcgcggtccccgtcccgggggttggccgcgcgggccccggtggggccacccggggtcccggccctcgcgcgtccttcctctcgctcctccgcacgggtcgaccagcagaccgcgggtggtgggcggcgggcggcgaggccgcacgggcgtccccgcacccggccgacctccgctcgtgacctctcctcggtcgggctccggggtcgaccgcctgccccgcgggcgtgagactcagccgctgtctcgccgtgtcccgggtcgaccggcgggcttctccaccgagcggcgtgtaggagtgcccgtcgggacgaaccgcaaccggagcgtccccgtctcggtcggcacctccggggtcgaccagctgccgcccgcgagctccggacttagccggcgcctgcacgtgtcccgggtcgaccagcaggcggccgcgacgtgcggcgcaccgacgagagggcgtgcattcccgttcgcgcgcccggaccctccaccggcctgggcccgacggtggagctgggaccacgcggaactccctctcctacatttttttcagccccaccgcgagtttgcgtccgcgggattttaagagggagtcactgctgccgtcagccagtaatgcttcctccttttttgcttttaggttttgctcttgcctttttttttttttttttctttctttctttctttctttctttctttctttctttctttctttctttctcgctctcgcctctcgctctctccctcgctcgttttctttctctttctctttctctctctctctctctctctctctctctgtctctcgctctcgccctctctctctctctcttctctctgtctctctctgtctctctctctctctctctctctctctctctctctctctctctctctctctccctccccctccctccctctctccccttccttggtgccttctcggctcttgacacttagccgctgtctcgccgtgtcccgggtcgaccggcgggccttctccaccgagcggcgtgtaagagtgcccgtcgggacgagccggacccgccgcgtccccgtctcggtcggcactccggggtcgaccagctg

SEQ ID NO: 25 - DNA, 3552 bp, Homo sapiens
ctgactggtgctccctctctttcatcttgggctgtctgcatgtgtctcattcccccactctctcctgtgcctcccctctactctaataatcaggtccaggtttctctgtactgggagaagacctgtggctggagcaggcagggatgcaccctatctgttccccattcctccaggtgggagggagaaggagtaacccactttattggccacagatgcaggggagaaaggagaaagcatgctgggagctggaaagagccctaagatcacctggtttctagagagtggagcctgcttcctgcctaggcccctcccacaatgcttgtcgccggtcttcttctctgggcttccctactgactggggcctggccatccttccctacccaggaccacctcccggccacgccccgggtacggctctcattcaaagagctgaaggccacaggcaccgcccacttcttcaacttcctgctcaacacaaccgactaccgaatcttgctcaaggacgaggaccacgaccgcatgtacgtgggcagcaaggactacgtgctgtccctggacctgcacgacatcaaccgcgagcccctcattatacactgggcagcctccccacagcgcatcgaggaatgcgtgctctcaggcaaggatgtcaacggcgagtgtgggaacttcgtcaggctcatccagccctggaaccgaacacacctgtatgtgtgcgggacaggtgcctacaaccccatgtgcacctatgtgaaccgcggacgccgcgcccaggattacatcttctacctggagcctgagcgactcgagtcagggaagggcaagtgtccgtacgatcccaagctggacacagcatcggccctcatcaatgaggagctctatgctggtgtgtacatcgattttatgggcactgatgcagccatcttccgcacacttggaaagcagacagccatgcgcacggatcagtacaactcccggtggctgaacgacccgtcgttcatccatgctgagctcattcctgacagtgcggagaatgatgataagctttacttcttcttccgtgagcggtcggcagaggcgccgcagagccccgcggtgtacgcccgcatcgggcgcatttgcctgaacgatgacggtggtcactgttgcctggtcaacaagtggagcacattcctgaaggcgcggctcgtctgctctgtcccgggcgaggatggcattgagactcactttgatgagctccaggacgtgtttgtccagcagacccaggacgtgaggaaccctgtcatttacgctgtctttacctcctctggctccgtgttccgaggctctgccgtgtgtgtctactccatggctgatattcgcatggtcttcaacgggccctttgcccacaaagaggggcccaactaccagtggatgcccttctcagggaagatgccctacccacggccgggcacgtgccctggtggaaccttcacgccatctatgaagtccaccaaggattatcctgatgaggtgatcaacttcatgcgcagccacccactcatgtaccaggccgtgtaccctctgcagcggcggcccctggtagtccgcacaggtgctccctaccgccttaccactattgccgtggaccaggtggattcagccgacgggcgctatgaggtgcttttcctgggcacagaccgcgggacagtgcagaaggtcattgtgctgcccaaggatgaccaggagatggaggagctcatgctggaggaggtggaggtcttcaaggatccagcacccgtcaagaccatgaccatctcttctaagaggcaacaactctacgtggcgtcagccgtgggtgtcacacacctgagcctgcaccgctgccaggcgtatggggctgcctgtgctgactgctgccttgcccgggacccttactgtgcctgggatggccaggcctgctcccgctatacagcatcctccaagaggcggagccgccggcaggacgtccggcacggaaaccccatcaggcagtgccgtgggttcaactccaatgccaacaagaatgccgtggagtctgtgcagtatggcgtggccggcagcgcagccttccttgagtgccagccccgctcgccccaagccactgttaagtggctgttccagcgagatcctggtgaccggcgccgagagattcgtgcagaggaccgcttcctgcgcacagagcagggcttgttgctccgtgcactgcagctcagcgatcgtggcctctactcctgcacagccactgagaacaactttaagcacgtcgtcacacgagtgcagctgcatgtactgggccgggacgccgtccatgctgccctcttcccaccactgtccatgagcgccccgccacccccaggcgcaggccccccaacgcctccttaccaggagttagcccagctgctggcccagccagaagtgggcctcatccaccagtactgccagggttactggcgccatgtgccccccagccccagggaggctccaggggcaccccggtctcctgagccccaggaccagaaaaagccccggaaccgccggcaccaccctccggacacatgaggccagctgcctgttctgccatgggcagcctagcccttgtcccttttaatataaaagacatatatatatatatatatatatatatataaaaatatctatattctatacacaccctgcccctgcaaagacagtatttattggtgggttgaatatagcctgcctcagtggcagcatcctccaaaacttagacccatgctggtcagagacggcagaaaacagagcctgcctaaccaggccagccagttagtggggccaggccaggaccacacagtccccagactcagctggagtctacctgctggacaggccttgcgccaagatctacaggacaaagggagggagcaagccctactcggatggggcacggaccgtccacctttctgatgtgtgttgtcagcctgtgctgtggcatagacatggatgcgaggaccactttggagactggggtggcctcaagagcacacagagaagggaagaaggggccatcacaggatgccacccctgccttgggttgggggcactctgccacgaccagccccttcctgggtatttattctctatttattggggataggagaagaggcatcctgcctgggtgggacagccccttgggccccttctcccctccccgcctggccagggagggccaccccactctacctccttagctttccctgtgccactttgactcagaggctgggagcatagcagaggccaggcccaggcagagctgacgggaggccccagctctgaggggagggggtccgtggtagagcctggggcaggtagaggctccccagggctcccttatgtccaccacttcaggggatgggtgtggatgtaattagctctggggggcagttgggtagatgggtgggggctcctggtggccttctgctgcccaggccacagccgcctttgggttccatcttgctaataaacactggctttggaactaaaaaaaaaaaaaaaaaa

SEQ ID NO: 26 - DNA, 996 bp, Homo sapiens
gtggaattcatggcatctacttcgtatgactattgcagagtgcccatggaagacggggataagcgctgtaagcttctgctggggataggaattctggtgctcctgatcatcgtgattctgggggtgcccttgattatcttcaccatcaaggccaacagcgaggcctgccgggacggccttcgggcagtgatggagtgtcgcaatgtcacccatctcctgcaacaagagctgaccgaggcccagaagggctttcaggatgtggaggcccaggccgccacctgcaaccacactgtgatggccctaatggcttccctggatgcagagaaggcccaaggacaaaagaaagtggaggagcttgagggagagatcactacattaaaccataagcttcaggacgcgtctgcagaggtggagcgactgagaagagaaaaccaggtcttaagcgtgagaatcgcggacaagaagtactaccccagctcccaggactccagctccgctgcggcgccccagctgctgattgtgctgctgggcctcagcgctctgctgcagtgagatcccaggaagctggcacatcttggaaggtccgtcctgctcggcttttcgcttgaacattcccttgatctcatcagttctgagcgggtcatggggcaacacggttagcggggagagcacggggtagccggagaagggcctctggagcaggtctggaggggccatggggcagtcctgggtgtggggacacagtcgggttgacccagggctgtctccctccagagcctccctccggacaatgagtcccccctcttgtctcccaccctgagattgggcatggggtgcggtgtggggggcatgtgctgcctgttgttatgggttttttttgcggggggggttgcttttttctggggtctttgagctccaaaaaataaacacttcctttgagggagagcaaaaaaaaaaaaaaaaaaaaaaaaaaaaaaaaaaaagaattccaccaca

SEQ ID NO: 27 - DNA, 3104 bp, Homo sapiens
ggggataagttttttttttttcttttttttcttttctctagtttttctttctggctgagatttccgtgcaagacagcacccaatagactatttagagttgacatttgacattttaatgggcgccatggctcattttgtagattgagaaggtgcgtctcccctgctccaagtctcatcatgacagcgtgctgacagctgggagtctgtggccttcctcacgcagaggccttaaagctggacacagatgcacgcctaggctgggcagggatgggacccatgccccctccttagaggacgggcttcctggttaggaaaggacacgtgggggtgccttgcataatagttcactggtcaccgtgcttttatgagtagtgtttttgtgcacttgccaggggttttctctctgtgtgcgaggggagtgatttaagcaatggtgtctggagtaagccttacaattttaatagactttttcttatcatatccctcatttctttccctgaaataaaaatacacacaagcaaaaaaaaaatgatagtttcacatctcttagttcccttgcccaaacaagaatattcttagttccactggccaggattttcctacatagtcagaacttacacattactagaggcacacccaccaaggagtattgtgtctacttttatctgtgcaccagccacaaatacccacattggaaagacccatttgtgatgggtaaacatcccttcctgtctcccacaacccctgtgactgccctgcatgtgttcatgacctccgaaggccctaattcatgaagcagcaaacccagcagatctccacccccctgcctcaggacctctgctgaagagggggatgaagtgggtctccagggaggcagtgggggccttgttggcagctggctcgggagccggcttacaggagggcagctctgcagttgggaggggcaccgtccggaggagaccaggcctctacacaccccccactctacttatcatccctgctcacacacccttgtccaaggctttatgcatcggatttatttttccaaatcgagaggacagtgatagatgcattttccccaggctgtctcagaaaggtcgctaaatgtatactgttgtcagaattgctgagatctccccccacttttggtttttgcagcagtaaaaactctttccactgtgacttattttctctctcaggcagccagccacctggtcccttgtgctgactctagcacagtggccaggatccaatacgagtccaggggtgaccgcaggatggtgggggcagcgggcttctccacctaccccagccaccaaggccctgacgcactgcctcctgcaccttcagcacatccctgtgcacagctggaagggtgcatggcccgctcacctttgttcagatgggtggaaacgctgatgataccagctcctccctgccgtgcccctgccacggagcaggcattgtgaactggctggtgtttgcagtcccacgtggcatggcctccagcccaacccacagtggagactggagacagggcaatgagtctggtcgggggcacgtggacatgccccataggggccccacccagacttaacaggcaaggtcctgggcattgcgcgacgcaggactcaatgctaaagcaagcctgcctggctctgtgccagggcccctcttctgatttacacatcccatttttacacagacccttccttcttaataaaggctgacagttctgttggcagccaagaacccacaccatgaagacagggagtgaggggcctttgtgcccaactccagcacagctgcgttctggggtgtgtgagaggcatgttcgtgtctgtgcgctggtggtctcgtgagacagttccgaggacggggaaattgcagggtggtgggggcgtgaggcttatatgtggaactgatgcagagttcgcctgcagacggatctggatatacactatgtataattgttacgtgtaatttaaaatatatctgtttgccatcgtcatgagaagattatatgtaaggctctgaagggagagggagatgtacattctgccaggctcctggggaccttatccgagtcatgaaattgatgactgttgatccagtggtgcaagaagctacactccatgtgtcatcacgcttatgactcctaatgtatttttaaggcaaaaaatgtcagccgactccatcttcacccctcgattcctcgagtccagcctttctgtgccagtgcttcactgagccacaacgctctcgccatcgggacccggctgggcctggagtctcggggcacagttgccatggagccctcctgggtcattctacaaatgtgctgagtgccagctgaaaaccccacaggagatggagtaccttggccaagcttaaagagaagattttctcagggtatttattagtgtgtccagcagggtcaggaagcaggatggaaagatgcattcagactgttaatttattaacaaggcaaatgattttgtgtttcttgatgacagactattaagtttgggacttattttcccatttgagaagttataatatatatttaagatgataagtttcctgcttaagttgtgcctttcagcttcaatgagtttaaggagcactaaggctaatgataccaatgagggttggtttattatcaaacctgaatagctgtggtttctccagtaaatattttcttctactgaacatggagccattattaagagttgtgtgttttttattatgtacatttgtatatttttttgcttgtttgatgttctatttttctaatagttttcttttagtttcttaaagttgtgatactagatttagattctgatgctaactgcaaatcaggttggtctctgctgggtctctcctgcttttattttactttaaggacaagtgtagttgtcgtccaccacctttcaaaaaatgtgaaactgccctgcctcccctttttgctgacaacactgtgtacattgaccacttcctaccatactttatgttgtaaaatcaaactcttttgtggtacattatctcatgcttctgcaaattcgaataaattctatggcttccaaaaaaaaaaaaaaaaaaaa

SEQ ID NO: 28 - DNA, 939 bp, Homo sapiens
  misc_feature (542)..(542): Each "n" represents a nucleotide selected from a, t, g or c, or contains no nucleotide.
ttccgtggctccccctggactgaatgctggaggatatatacttcacagtctgaggcctggtcccaggaactggcaatctaacaggatggcaagtggttttgaaacatatagattttcaggatggaagtttgattcttcagattgtgactcatccgtggaaaataaacggtttagcacctaaatctgtatattcccatcagtggcttggctgactcagttgtaaatagggtaccctccatctgtctcccacccatatgctccactgtccccaggccctcagtgcctgagccctagggggattcgagttggctgctggattcatttcctgcaagcaggcctgcaaggtgacctgtctctctaagatggagagctggagaactggcctgtaactgcaaacttaaactcccttggctctggggaatgtaaagggtgtgggaagggtgcacctgcggccaggtgaacctgggagtgagtacacacacagacacacacactcatagctcccttccctccaccacacacacacacaaactaatgacttncaacctaagaaggggaaaaatgaatggggaatgggcccacaggggctctgggctcagttcatgaggtgtggtcgttcgctatgccgaggaatcagtgcacagagggtcagaacatgagtttaggagggcgggtccactccgaatcggagggtggactcttcggcattctttctgaacagctccggattctgtgtcagcaggtcagggaggtccatacggaggggctccctgataattcggtcattcaacaggcacttggagggcttcaggacatgggcaagtttggtggaaagctttcagttctcacggctgatgagggcaagacaaatcgtcccgtcacgtcaacgttggggtggtagaatctggtatggaatttgataatgggaggcttaaagga

SEQ ID NO: 29 - DNA, 2573 bp, Homo sapiens
gaatcggccgatgtgaaccgaatgttgatgtaagaggcagggcactcggctgcggatgggtaacagggcgtgggctggcacacttacttgcaccagtgcccagagagggggtgcaggctgaggagctgcccagagcaccgctcacactcccagagtacctgaagtcggcatttcaatgacaggtgacaagggtccccaaaggctaagcgggtccagctatggttccatctccagcccgaccagcccgaccagcccagggccacggcaagcacctcccagagagacctacctgagtgagaagatccccatcccagacacaaaaccgggcaccttcagcctgcggaagctatgggccttcacggggcctggcttcctcatgagcattgctttcctggacccaggaaacatcgagtcagatcttcaggctggcgccgtggcgggattcaaacttctctgggtgctgctctgggccaccgtgttgggcttgctctgccagcgactggctgcacgtctgggcgtggtgacaggcaaggacttgggcgaggtctgccatctctactaccctaaggtgccccgcaccgtcctctggctgaccatcgagctagccattgtgggctccgacatgcaggaagtcatcggcacggccattgcattcaatctgctctcagctggacgaatcccactctggggtggcgtcctcatcaccatcgtggacaccttcttcttcctcttcctcgataactacgggctgcggaagctggaagctttttttggactccttataaccattatggccttgacctttggctatgagtatgtggtggcgcgtcctgagcagggagcgcttcttcggggcctgttcctgccctcgtgcccgggctgcggccaccccgagctgctgcaggcggtgggcattgttggcgccatcatcatgccccacaacatctacctgcactcggccctggtcaagtctcgagagatagaccgggcccgccgagcggacatcagagaagccaacatgtacttcctgattgaggccaccatcgccctgtccgtctcctttatcatcaacctctttgtcatggctgtctttgggcaggccttctaccagaaaaccaaccaggctgcgttcaacatctgtgccaacagcagcctccacgactacgccaagatcttccccatgaacaacgccaccgtggccgtggacatttaccaggggggcgtgatcctgggctgcctgttcggccccgcggccctctacatctgggccataggtctcctggcggctgggcagagctccaccatgacgggcacctacgcgggacagttcgtgatggagggcttcctgaggctgcggtggtcacgcttcgcccgtgtcctcctcacccgctcctgcgccatcctgcccaccgtgctcgtggctgtcttccgggacctgagggacttgtcgggcctcaatgatctgctcaacgtgctgcagagcctgctgctcccgttcgccgtgctgcccatcctcacgttcaccagcatgcccaccctcatgcaggagtttgccaatggcctgctgaacaaggtcgtcacctcttccatcatggtgctagtctgcgccatcaacctctacttcgtggtcagctatctgcccagcctgccccaccctgcctacttcggccttgcagccttgctggccgcagcctacctgggcctcagcacctacctggtctggacctgttgccttgcccacggagccacctttctggcccacagctcccaccaccacttcctgtatgggctccttgaagaggaccagaaaggggagacctctggctaggcccacaccagggcctggctgggagtggcatgtatgacgtgactggcctgctggatgtggagggggcgcgtgcaggcagcaggatggagtgggacagttcctgagaccagccaacctgggggctttagggacctgctgtttcctagcgcagccatgtgattaccctctgggtctcagtgtcctcatctgtaaaatggagacgccaccacccttgccatggaggttaagcactttaacacagtgtctggcacttgggacaaaaacaaacaaacaaacaaaaaacatttcaaaaggtatttattgagcacctgcaggcgtgacctgacagcccaagggtgggtggggtgagggcttgaggacttgggcgggacacaggctccaaactggagcttgaaatagtgtctgatgaatgttaaattatctatctatctatttatttatttatttgagacagggaaagggtctccctctgttgccaaggctggagtgcagtggcgcaatcttaactcattgcaacctccaccttctgggttcaagcgattctctttattcagccccgggagtggcgcgcgccaccacgcccagctaatttgtgtattttcagcagagacggggtttgccatgctggccaggctggtctcgaactgctggattcaagtgatccgcccatctccgtctcccaaagtgctgggaattacaggcgtgagccaccaaaacccggcctgattaaagttaaataaatacg

SEQ ID NO: 30 - DNA, 251 bp, Homo sapiens
ccacgcactagctcggttattggttatgccaaaggcactctccatctcccacatctggttattgacaagtgtaactttattttcatcgcggactctggggaagggggtcactcacaagctgtagctgccatacatgcccatctagcttgcagtctcttcgcgctttcgctgtctctcttattatgactgtgtttatctgaaacttgaagacaagtctgttaaaatggttcctgagccgtctgtaccactgc

SEQ ID NO: 31 - DNA, 1587 bp, Homo sapiens
tggcactaggggcagccactcagcccttcgagctgtaggggaggcgctgcgcccccggccccagccgatcgggggctcctggcgctactgccctccagagtccctcctgccgtctgacttgagtccctgctgctgcagtgcacgcccccctttcggcagccagggtggggcccagacccaacctggcccctcctgcccccaccccgcctttgggtcgctgacccccaggctgtggtgagggtctgagagctggtaccacggagcctgggcaacctcctccgcccacccatgcccaccccgcatgaggctgagaagcagatcacagggccagaggaggcggaccggcccccttcaatgtccagtcatgatacagcctctccagcggcccccagccgcaacccctgctgcctgtgctggtgctgctgctgtagctgctcctggaaccaagagcggcggcgcgcgtggcaggcctcccgggagagcaagctgcagcccctccccagctgtgaagtatgtgccacgccaagtcctgaggaggtgcagagctgggcgcagtcttttgacaagctgatgcacagcccagcgggacgcagcgtgttccgggcgttcctgcggacagagtacagcgaggagaacatgctcttctggttggcctgcgaggagctgaaggccgaggccaaccagcatgtggtagacgagaaggcgaggctcatctacgaggactacgtatccatcctgtcccccaaggaggtgagcctggactcccgtgtgcgggagggcatcaacaagaagatgcaggagccgtccgcacacacgttcgacgacgcgcagctgcagatctacacgctcatgcaccgggactcctacccccgcttcctcagctctcccacctaccgtgccctgctgctgcaggggccatcacagtcctcctccgaggcctaggccgcccccagcagcacagaccccgccgcctcctacggccgactctgggttcccttcaggtgttggtgtcggcagggctgtcagggcacatgcctggccggctggggtccccacccgcggagacggtcctagacccagtggggagtgctgtgtctcctgggtctgcccacccgtggccaagcaggaactccaggtgcagggcgggcctccaggtgcagggcgggccagaagccccctcatcggcccgcagctggctggcccagtgctcctggctgggggctcttgcgtggtgagagtaggggtccccccaggagccatgctggacccatgagcctcgctggggcctcctccccaggcagccaatgggccccagacaagcctttggtggggaacagaacctccgcatcgtgtagttttgtgacataaggagacctcctacttgagctgtctgtaccccagaatcaaacacagaactcagaaccagatttaggccctcagaatcctgcactcaaggtggcaggacccaatttctgttttatatgttcatgaactttaaacctggaaacatgtccttactaggtgttttatcaaaaaaaagttttttattattgaagatatttttaaagcaaaaaaaaaaaaaaaaaa

SEQ ID NO: 32 - DNA, 3686 bp, Homo sapiens
gcggccgccccggctcccggctgcaggaatcgcgccaggacgctggccccgctcgcggctagcttgcacgccagggcacagcgaggatgggagggtcgcagtccctgcagccagccccagccagcgacctgaacctggaggcttccgaggcaatgagttccgattctgaagaggcatttgagaccccggagtcaacgacccctgtcaaagctccgccagctccacccccaccaccccccgaagtcatcccagaacccgaggtcagcacacagccacccccggaagaaccaggatgtggttctgagacagtccctgtccctgatggcccacggagcgactcggtggaaggaagtcccttccgtcccccgtcacactccttctctgccgtcttcgatgaagacaagccgatagccagcagtgggacttacaacttggactttgacaacattgagcttgtggatacctttcagaccttggagcctcgtgcctcagacgctaagaatcaggagggcaaagtgaacacacggaggaagtccacggattccgtccccatctctaagtctacactgtcccggtcgctcagcctgcaagccagtgactttgatggtgcttcttcctcaggcaatcccgaggccgtggcccttgccccagatgcatatagcacgggttccagcagtgcttctagtacccttaagcgaactaaaaaaccgaggccgccttccttaaaaaagaaacagaccaccaagaaacccacagagacccccccagtgaaggagacgcaacaggagccagatgaagagagccttgtccccagtggggagaatctagcatctgagacgaaaacggaatctgccaagacggaaggtcctagcccagccttattggaggagacgccccttgagcccgctgtggggcccaaagctgcctgccctctggactcagagagtgcagaaggggttgtccccccggcttctggaggtggcagagtgcagaactcaccccctgtcgggaggaaaacgctgcctcttaccacggccccggaggcaggggaggtaaccccatcggatagcggggggcaagaggactctccagccaaagggctctccgtaaggctggagtttgactattctgaggacaagagtagttgggacaaccagcaggaaaacccccctcctaccaaaaagataggcaaaaagccagttgccaaaatgcccctgaggaggccaaagatgaaaaagacacccgagaaacttgacaacactcctgcctcacctcccagatcccctgctgaacccaatgacatccccattgctaaaggtacttacacctttgatattgacaagtgggatgaccccaattttaaccctttttcttccacctcaaaaatgcaggagtctcccaaactgccccaacaatcatacaactttgacccagacacctgtgatgagtccgttgacccctttaagacatcctctaagacccccagctcaccttctaaatccccagcctcctttgagatcccagccagtgctatggaagccaatggagtggacggggatgggctaaacaagcccgccaagaagaagaagacgcccctaaagactgacacatttagggtgaaaaagtcgccaaaacggtctcctctctctgatccaccttcccaggaccccaccccagctgctacaccagaaacaccaccagtgatctctgcggtggtccacgccacagatgaggaaaagctggcggtcaccaaccagaagtggacgtgcatgacagtggacctagaggctgacaaacaggactacccgcagccctcggacctgtccacctttgtaaacgagaccaaattcagttcacccactgaggagttggattacagaaactcctatgaaattgaatatatggagaaaattggctcctccttacctcaggacgacgatgccccgaagaagcaggccttgtaccttatgtttgacacttctcaggagagccctgtcaagtcatctcccgtccgcatgtcagagtccccgacgccgtgttcagggtcaagttttgaagagactgaagcccttgtgaacactgctgcgaaaaaccagcatcctgtcccacgaggactggcccctaaccaagagtcacacttgcaggtgccagagaaatcctcccagaaggagctggaggccatgggcttgggcaccccttcagaagcgattgaaattacagctcccgagggctcctttgcctctgctgacgccctcctcagcaggctagctcaccccgtctctctctgtggtgcacttgactatctggagcccgacttagcagaaaagaaccccccactattcgctcagaaactccaggaggagttagagtttgccatcatgcggatagaagccctgaagctggccaggcagattgctttggcttcccgcagccaccaggatgccaagagagaggctgctcacccaacagacgtctccatctccaaaacagccttgtactcccgcatcgggaccgctgaggtggagaaacctgcaggccttctgttccagcagcccgacctggactctgccctccagatcgccagagcagagatcataaccaaggagagagaggtctcagaatggaaagataaatatgaagaaagcaggcgggaagtgatggaaatgaggaaaatagtggccgagtatgagaagaccatcgctcagatgatagaggacgaacagagagagaagtcagtctcccaccagacggtgcagcagctggttctggagaaggagcaagccctggccgacctgaactccgtggagaagtctctggccgacctcttcagaagatatgagaagatgaaggaggtcctagaaggcttccgcaagaatgaagaggtgttgaagagatgtgcgcaggagtacctgtcccgggtgaagaaggaggagcagaggtaccaggccctgaaggtgcacgcggaggagaaactggacagggccaatgctgagattgctcaggttcgaggcaaggcccagcaggagcaagccgcccaccaggccagcctgcggaaggagcagctgcgagtggacgccctggaaaggacgctggagcagaagaataaagaaatagaagaactcaccaagatttgtgacgaactgattgccaaaatggggaaaagctaactctgaaccgaatgttttggacttaactgttgcggcaatatgaccgtcggcacactgctgttcctccagttccatggacaggttctgttttcactttttcgtatgcactactgtatttcctttctaaataaaattgatttgattgtatgcagtactaaggagactatcagaatttcttgctattggtttgcattttcctagtataattcatagcaagttgacctcagagttcctgtatcagggagattgtctgattctctaataaaagacacattgctgaccttggccttgccctttgtacacaagttcccagggtgagcagcttttggatttaatatgaacatgtacagcgtgcatagggactcttgccttaaggagtgtaaacttgatctgcatttgctgatttgtttttaaaaaaacaagaaatgcatgtttcaaataaaattctctattgtaaataaaattttttctttggatcttgaaaaaaaaaaaaaaaaaaaaaaaaaaaaaaaaaaaaaa

SEQ ID NO: 33 - DNA, 1368 bp, Homo sapiens
gtgactgcctcttccagggcgggcggtgtggtgcacgcattgctgtgctccaactccctcagggcctgtgttgccgcactctgctgctatgagcttcctcaaaagtttcccgccgcctgggccagcggaggggctcctgcggcagcagccagacactgaggctgtgctgaacgggaagggcctcggcactggtaccctttacatcgctgagagccgcctgtcttggttagatggctctggattaggattctcactggaataccccaccattagtttacatgcattatccagggaccgaagtgactgtctaggagagcatttgtatgttatggtgaatgccaaatttgaagaagaatcaaaagaacctgttgctgatgaagaagaggaagacagtgatgatgatgttgaacctattactgaatttagatttgtgcctagtgataaatcagcgttggaggcaatgttcactgcaatgtgcgaatgccaggccttgcatccagatcctgaggatgaggattcagatgactacgatggagaagaatatgatgtggaagcacatgaacaaggacagggggacatccctacattttacacctatgaagaaggattatcccatctaacagcagaaggccaagccacactggagagattagaaggaatgctttctcagtctgtgagcagccagtataatatggctggggtcaggacagaagattcaataagagattatgaagatgggatggaggtggataccacaccaacagttgctggacagtttgaggatgcagatgttgatcactgaaaatgatttatgcaagtttaagattctgctcctaagtgtaggagagaacttggtgcctcttccactctggagtgaagttaatgaaagtctttttccttttccaaaacccaacctgaaccagttctttcttgagacagactatactgagacaacaagttgtcaccagcagaagatagataatatgacctttattaacttgatgaattaacttaaccaagagggtatttgtagtttactatttaccctaaaactttctgtgtctgggtaccctctgagtaggcctataattcctaccttgactgtgtgcatcatttgtaagctagcagatctatgtggtgaaaatgcacaggagcttggtagactgcgggggaaagagagagctcctttcgccatgttttaccagtctgctgttataacctcttaggttgtatcctttaatttccagccttttaggttagtttctgtaacagaacaagtgagtctgggatgaagtcctcaaagtacttcaaatggtaattgttttgtttttgtaatagcttaacaaataaacctaggttttctataaa

SEQ ID NO: 34 - DNA, 5421 bp, Homo sapiens
ccgggatccggttttttttgtttttaaaagtgtaatttcctttttatttgcatctgtttatgactgaaaaaaatgactagttattatgaagacactactgttgaagatggatattttaacatggagtttcaacaaaattacttcttgagacagagctgatgtgttttttaaataacgtgattttaagcatatatttgaacaaaactaaaacatttagtattatgaatatgaaaaaagatcagtaaatcaatgtactcttctaggctgaattaaggtagactatttaaggtttcaaaaaagtttggctggggcagaataagttttacaaaacccatgccatccaaaattaagatgacatgtagcagcaagaagtattccaatgtctcataaccagttctcgcaagcaatgtgtattccttactttaaggaagtgtcaaacaaatagaaaaatctggaagaatttactaagtgtaataaattagaggtaaatcgtaataaaagaatttatgtctcacaaaaatattcacaagtgggagttttcttttaccaacttctcagagtccttctagccccctcttcacttctgaaagatgggatttaccaaaatctggtttacatttaacttttcagggacacatgacctgaaaagaaagatgtcagataatactgacattgcctcatgcactttctttgtatcagtccttcttctgtaagtaatcagaattgggtccaaatggcatagaatcaaacattatgtatcatgccaaataccacttcctgcccaacaaaatttcatctttctccagtaatgaagaggtggacattcttgttggactgtagcatctgtgccgcccgctccacaccaaccacggcagctaacctctgggcatcatatttggagtagagaacagtgcaggtccacgtggcctcttctcctctgttggtggctctcagcatattacagatttcactgtaaaagtgtggatatgtcggcagttcatagaaaatcaggttcctgatgccttttattgctgtagtttatttccacccccttccctcctgttttctctctctccttctctctctctctctctctctcttttttttccgccctagctggggctgtgttggaggagaggaagaaagagagacagaggattgcattcatccgttacgttcttgaaatttcctaatagcaagaccagcgaagcggttgcacccttttcaatcttgcaaaggaaaaaaacaaaacaaaacaaaaaaaacccaagtccccttcccggcagtttttgccttaaagctgccctcttgaaattaattttttcccaggagagagatgtcttatcaggggaagaaaaatattccacgcatcacgagcgatcgtcttctgatcaaaggaggtaaaattgttaatgatgaccagtcgttctatgcagacatatacatggaagatgggttgatcaagcaaataggagaaaatctgattgtgccaggaggagtgaagaccatcgaggcccactcccggatggtgatccccggaggaattgacgtccacactcgtttccagatgcctgatcagggaatgacgtctgctgatgatttcttccaaggaaccaaggcggccctggctgggggaaccactatgatcattgaccacgttgttcctgagcctgggacaagcctgctcgctgcctttgaccagtggagggaatgggccgacagcaagtcctgctgtgactactctctgcatgtggacatcagcgagtggcataagggcatccaggaggagatggaagcgcttgtgaaggatcacggggtaaattccttcctcgtgtacatggctttcaaagatcgcttccagctaacggattgccagatttatgaagtactgagtgtgatccgggatattggcgccatagcccaagtccacgcagaaaatggcgacatcattgcagaggagcagcagaggatcctggatctgggcatcacgggccccgagggacatgtgctgagccgacctgaggaggtcgaggccgaagccgtgaatcgtgccatcaccatcgccaaccagaccaactgcccgctgtatatcaccaaggtgatgagcaaaagctctgctgaggtcatcgcccaggcacggaagaagggaactgtggtgtatggcgagcccatcactgccagcttgggaacggacggctcccattactggagcaagaactgggccaaggctgctgcctttgtcacctccccacccttgagccctgatccaaccactccagactttctcaactccttgctgtcctgtggagacctccaggtcacgggcagtgcccattgcacgtttaacactgcccagaaggctgtaggaaaggacaacttcaccctgattccggagggcaccaatggcactgaggagcggatgtccgtcatctgggacaaggctgtggtcactgggaagatggatgagaaccagtttgtggctgtgaccagcaccaatgcagccaaagtcttcaacctttacccccggaaaggccgcattgctgtgggatccgatgccgacctggtcatctgggaccccgacagcgttaaaaccatctctgccaagacacacaacagctctctcgagtacaacatctttgaaggcatggagtgccgcggctccccactggtggtcatcagccaggggaagattgtcctggaggacggcaccctgcatgtcaccgaaggctctggacgctacattccccggaagcccttccctgattttgtttacaagcgtatcaaggcaaggagcaggctggctgagctgagaggggttcctcgtggcctgtatgacggacctgtgtgtgaagtgtctgtgacgcccaagacagtcactccagcctcctcggccaagacgtctcctgccaagcagcaggccccacctgtccggaacctgcaccagtctggattcagtttgtctggtgctcagattgatgacaacattccccgccgcaccacccagcgtatcgtggcgccccccggtggccgtgccaacatcaccagcctgggctagagctcctgggctgtgcgtccactggggactggggatgggacacctgaggacattctgagacttctttcttccttccttttttttttttgtttttttttttaagagcctgtgatagttactgtggagcagccagttcatggggtcccccttgggcccacaccccgtctctcaccaagagttactgattttgctcatccacttccctacacatctatgggtatcacacccaagactacccaccaagctcatacagggaaccacacccaacacttagacatgcgaacaagcagcccccagcgagggtctccttcgccttcaacctcctagtgtctgttagcattccttttcatggggggagggaagataaagtgaattgcccagagctgcctttttcttttctttttaaaaattttaagaagttttccttgtggggctggggaggggccggggtcagggagagtctttttttttttttttttaaatactaaattggaacatttaattccatattaatacaaggggtttgaactggacatcctaatgatgcaattacgtcatcacccagctgattccgggtggttggcaaactcatcgtgtctgtcctgagaggctccacaatgcccacccgcatcgccattctgtagtcttcagggtcagctgttgataaaggggcaggcttgcgttattggcctagattttgctgcagattaaatcctttgaggattctcttctcttttaccatttttctgcgtgctctcactctctctttctctctctagctttttaattcatgaatattttcgtgtctgtctctctctctctctgtgtttcctccagcccttgtctcggagacggtgttttcctcccttgccccattatcttttcacctcccaggtctacatttcatggtggtcgttgggtccgcctaaaggatttgagcgtttgccattgcaagcatagtgctgtgtcatcctggtccatgtaggactggtgctaaccacctgccatcatgaggatgtgtgctagagtgtgggaccctggccaagtgcaggaatgggccatgccgtctcacccacagtatcacacgtggaaccgcagacagggcccagaagctttagaggtatgaggctgcagaaccggagagattttcctctgtgcagtgctctctggctaaagtcacggtcaaacctaaacaccgagcctcattaacccaagtgaaccaaccaaagtcaccagttcagaagtgctaagctaataggagtctgacccgagggcctgctgcttcctggttaagtatcttttgagattctagaacacatgggagctttttattttcggggaaaaaccgtatttttttcttgtccaattatttctaaagacacactacatagaaagaggccctataaactcaaaaagtcattgggaaacttaaagtctattctactttgccaagaggagaaatgtgttttatgaacgatagatcacatcagaactcctgtggggaggaaaccttataaattaaacacatggcccccttagagaccacaggcgatgtctgtctccatccttccctctccttttctgtcacctttccccctagctggctcctttggacctacccctgtccttgctgacttgtgttgcattgtattccaaacgtgtttacaggttctcttaagcaatgttgtatttgcaggcttttctgaataccaaatctgctttttgtaaagcgtaaaaacatcacaaagtaggtcattccatcaccacccttgtctctctacacattttgcctttggggatctggttggggttttgggttttttgttgttgttgtttatttgttattttaaaggtaaattgcacttttaaaaaaataattggttgacttaatatatttgctttttttctcacctgcacttagaggaaatttgaacaagttggaaaaaaacaatttttgtttcaattctaagaaacacttgcagctctagtattcacttgagtcttcctgtttttcctgtaccgggtcatggtaatttttggttgttttggttgttttcttaaaaaacaagttaaaacctgacgatttctgcagtgacttgatgctctaaaacagtgtaggatttaagaatagatggtttttaatcctggaaattgtgattgtgacccatgagtggaggaactttcagttctaaagctgataaagtgtgtagccagaagagtactttttttttgtaaccactgtcttgatggcaaaataattatggtaaaaaacaagtctcgtgtttattattccttaagaactctgtgttatattaccatggaacgcctaataaagcaaaatgtggttgtttcaaaaaaaaaaaaaa

SEQ ID NO: 35 - DNA, 1977 bp, Homo sapiens
cactccagtgtggcatcatgtggcagctgctcctcccaactgctctgctacttctagtttcagctggcatgcggactgaagatctcccaaaggctgtggtgttcctggagcctcaatggtacagggtgctcgagaaggacagtgtgactctgaagtgccagggagcctactcccctgaggacaattccacacagtggtttcacaatgagaacctcatctcaagccaggcctcgagctacttcattgacgctgccacagtcgacgacagtggagagtacaggtgccagacaaacctctccaccctcagtgacccggtgcagctagaagtccatgtcggctggctgttgctccaggcccctcggtgggtgttcaaggaggaagaccctattcacctgaggtgtcacagctggaagaacactgctctgcataaggtcacatatttacagaatggcaaagacaggaagtattttcatcataattctgacttccacattccaaaagccacactcaaagatagcggctcctacttctgcagggggcttgttgggagtaaaaatgtgtcttcagagactgtgaacatcaccatcactcaaggtttggcagtgtcaaccatctcatcattctctccacctgggtaccaagtctctttctgcttggtgatggtactcctttttgcagtggacacaggactatatttctctgtgaagacaaacatttgaagctcaacaagagactggaaggaccataaacttaaatggagaaaggaccctcaagacaaatgacccccatcccatgggagtaataagagcagtggcagcagcatctctgaacatttctctggatttgcaaccccatcatcctcaggcctctctacaagcagcaggaaacatagaactcagagccagatcctttatccaactctcgatttttccttggtctccagtggaagggaaaagcccatgatcttcaagcagggaagccccagtgagtagctgcattcctagaaattgaagtttcagagctacacaaacactttttctgtcccaaccattccctcacagtaaaacaacaatacaggctagggatggtaatcctttaaacatacaaaaattgctcgtattataaattacccagtttagaggggaaaaaagaaaataattattcctaaacaaatggataagtagaattaatgattgaggcaggaccctacagagtgtgggaactgctggggatctagagaattcagtgggaccaatgaaagcatggctgagaaatagcagggtagtccaggatagtctaagggaggtgttcccatctgagcccagagataagggtgtcttcctagaacattagccgtagtggaattaacaggaaatcatgagggtgacgtagaattgagtcttccaggggactctatcagaactggaccatttccaagtatataacgatgagccctctaatgctaggagtagcaaatggtcctaggaaggggactgaggattggggtgggggtggggtggaaaagaaagtacagaacaaaccctgtgtcactgtcccaagttaagctaagtgaacagaactatctcagcatcagaatgagaatgagaaagcctgagaagaaagaaccaaccacaagcacacaggaaggaaagcgcaggaggtgaaaatgctttcttggccagggtagtaagaattagaggttaatgcagggactgtaaaaccaccttttctgcttcaatgtctagttcctgtatagctttgttcattgcatttattaaacaaatgttgtataaccaatactaaatgtactactgagcttcactgagttacgctgtgaaactttcaaatccttcttcagtcagttccaatgaggtggggatggagaagacaattgttgcttatgaaaaaaagctttagctgtctcctgttttgtaagctttcagtgcaacatttcttggttccaataaagcattttac

SEQ ID NO: 36 - DNA, 1985 bp, Homo sapiens
tactgactttcagcaccaacttgtggtcccaggtaagtttccacgctggtactttagccctgggctcgaacctgcggacacgctgtggctgcaactccccgcccgccagacctcagtacgcagcgcggctggtgagaaacataatgcactctgacttccacgcgtggaatggggagatggactgcacggcgggcggacctgctcgggctgatggacggcaggtggactgatgtgcgcagggactggcggcagcgcggtcagagccagtcagccaaagccaggccagcacaatagactgtcccggttcccgccaggaggcggccgagcaccaactgtacggtactgcgcctgcgccgcgaccgccaacgcgcccagtctacgcttgcgcggcgcaacagggccgactgcagctggaagatggcggcgtccgtggtctgtcgggccgctaccgccggggcacaagtgctattgcgcgcccgccgctcgccggccctgctgcggacgccagccttgcggagtacggcaaccttcgctcaggcgctccagttcgtgccggagacgcaggttagcctgctggacaacggcctgcgtgtggcctccgagcagtcctctcagcccacttgcacggtgggagtgtggattgatgttggcagccgttttgagactgagaagaataatggggcaggctactttttggagcatctggctttcaagggaacaaagaatcggcctggcagtgccctggagaaggaggtggagagcatgggggcccatcttaatgcctacagcacccgggagcacacagcttactacatcaaggcgctgtccaaggatctgccgaaagctgtggagctcctgggtgacattgtgcagaactgtagtctggaagactcacagattgagaaggaacgtgatgtgatcctgcgggagatgcaggagaatgatgcatctatgcgagatgtggtctttaactacctgcatgccacagcattccagggcacacctctagcccaggctgtggaggggcccagtgagaatgtcaggaagctgtctcgtgcagacttgaccgagtacctcagcacacattacaaggcccctcgaatggtgctggcagcagctggaggagtggagcaccagcaactgttagacctcgcccagaagcacctcggtggcatcccatggacatatgcagaggacgctgtgcccactcttactccatgccgcttcactggcagtgagatccgccaccgtgatgatgctctaccttttgcccacgtggccattgcagtagagggtcctggctgggccagcccggacagtgtggccttgcaagtggccaatgccatcatcggccactatgactgcacttatggtggtggcgtgcacctgtccagcccactggcttcaggtgctgtggccaacaagctatgccagagtttccagaccttcagcatctgctatgcagagacgggcttgctgggtgcacactttgtctgtgaccgaatgaaaatcgatgacatgatgttcgtcctgcaagggcagtggatgcgcctgtgtaccagtgccacggagagtgaggtggcccggggcaaaaacatcctcagaaatgccctggtatctcatctagatggcactactcctgtgtgtgaggacatcggacgcagcctcctgacctatggccgccgcatccccctggctgaatgggaaagccggattgcggaggtggatgccagtgtggtacgtgagatctgctccaagtacatctatgaccagtgcccagcagtggctggatatggccccattgagcagctcccagactacaaccggatccgtagcggcatgttctggctgcgcttctaggcgggaagcctatgtaagcaagagggcagggccggggtttgtggtcccccccccaccacaaacacagcacttcggctcctctaacctgtgccacaggtgaccaccaataaaatcctctgctgaga

SEQ ID NO: 37 - DNA, 849 bp, Homo sapiens
atgaggaactcctatagatttctggcatcctctctctcagttgtcgtttctctcctgctaattcctgaagatgtctgtgaaaaaattattggaggaaatgaagtaactcctcattcaagaccctacatggtcctacttagtcttgacagaaaaaccatctgtgctggggctttgattgcaaaagactgggtgttgactgcagctcactgtaacttgaacaaaaggtcccaggtcattcttggggctcactcaataaccagggaagagccaacaaaacagataatgcttgttaagaaagagtttccctatccatgctatgacccagccacacgcgaaggtgaccttaaacttttacagctgacggaaaaagcaaaaattaacaaatatgtgactatccttcatctacctaaaaagggggatgatgtgaaaccaggaaccatgtgccaagttgcagggtgggggaggactcacaatagtgcatcttggtccgatactctgagagaagtcaatatcaccatcatagacagaaaagtctgcaatgatcgaaatcactataattttaaccctgtgattggaatgaatatggtttgtgctggaagcctccgaggtggaagagactcgtgcaatggagattctggaagccctttgttgtgcgagggtgttttccgaggggtcacttcctttggccttgaaaataaatgcggagaccctcgtgggcctggtgtctatattcttctctcaaagaaacacctcaactggataattatgactatcaagggagcagtttaaataaccgtttcctttcatttactgtggcttcttaatcttttcacaaataaaatcaatttg

SEQ ID NO: 38 - DNA, 505 bp, Homo sapiens
acgccgagatgaccacacggatggtggcgtccaagatggagctacacgcgttatctacgggccgcgagccccgcgtggccacggtcactcgcatcctgcgccagacgctcttcaggtaccagggccacgtgggtgcatcgctgatcgtgggcggcgtagacctgactggaccgcagctctacggtgtgcatccccatggctcctacagccgtctgcccttcacagccctgggctctggtcaggacgcggccctggcggtgctagaagaccggttccagccgaacatgacgctggaggctgctcaggggctgctggtggaagccgtcaccgccgggatcttgggtgacctgggctccgggggcaatgtggacgcatgtgtgatcacaaagactggcgccaagctgctgcggacactgagctcacccacagagcccgtgaagaggtctggccgctaccactttgtgcctggaaccacagctgtcctgacccagacagtgaagccact

SEQ ID NO: 39 - DNA, 1314 bp, Homo sapiens
cggctgtgttgcgcagtcttcatgggttcccgacgaggaggtctctgtggctgcggcggcggctgctaactgcgccacctgctgcagcctgtccccgccgctctgaagcggccgcgtcgaagccgaaatgccgccaccccggaccggccgaggccttctctggctgggtctggttctgagctccgtctgcgtcgccctcggatccgaaacgcaggccaactcgaccacagatgctctgaacgttcttctcatcatcgtggatgacctgcgcccctccctgggctgttatggggataagctggtgaggtccccaaatattgaccaactggcatcccacagcctcctcttccagaatgcctttgcgcagcaagcagtgtgcgccccgagccgcgtttctttcctcactggcaggagacctgacaccacccgcctgtacgacttcaactcctactggagggtgcacgctggaaacttctccaccatcccccagtacttcaaggagaatggctatgtgaccatgtcggtgggaaaagtctttcaccctgggatatcttctaaccataccgatgattctccgtatagctggtcttttccaccttatcatccttcctctgagaagtatgaaaacactaagacatgtcgagggccagatggagaactccatgccaacctgctttgccctgtggatgtgctggatgttcccgagggcaccttgcctgacaaacagagcactgagcaagccatacagttgttggaaaagatgaaaacgtcagccagtcctttcttcctggccgttgggtatcataagccacacatccccttcagataccccaaggaatttcagaagttgtatcccttggagaacatcaccctggcccccgatcccgaggtccctgatggcctaccccctgtggcctacaacccctggatggacatcaggcaacgggaagacgtccaagccttaaacatcagtgtgccgtatggtccaattcctgtggactttcagcggaaaatccgccagagctactttgcctctgtgtcatatttggatacacaggtcggccgcctcttgagtgctttggacgatcttcagctggccaacagcaccatcattgcatttacctcggatcatggtttcctcatgaggacaaatacctgattttgaataaagcagcattcagttgaaataaccctttctgtggtaattccaagtgaatatttttcttctaggtgatgagtttctacttcctctggtttttacaacaggaaatgaaatggtatctaaaataaacaagctgtggtatgatgataatt

SEQ ID NO: 40 - DNA, 162 bp, Homo sapiens
gtttggtgctgacggtgagaggaaattagaatctgtttgcaaattgtccaacccaccccctcaacatgaggggcttccattttctgtgttttgtaagggaactgtttccttcatgccgccatgttcctgatattagttctgatttctttttaacaaatgtta

SEQ ID NO: 41 - DNA, 2691 bp, Homo sapiens
ggagacagacagacagctggcaagaggcagcctgggggccacagctgcttcagcagacctcatggctgagtgagcctcccctgggcccagcaccccacctcagcatggtccaagcccatggggggcgctccagagcacagccgttgaccttgtctttgggggcagccatgacccagcctccgcctgaaaaaacgccagccaagaagcatgtgcgactgcaggagaggcggggctccaatgtggctctgatgctggacgttcggtccctgggggccgtagaacccatctgctctgtgaacacaccccgggaggtcaccctacactttctgcgcactgctggacacccccttacccgctgggcccttcagcgccagccacccagccccaagcaactggaagaagaattcttgaagatcccttcaaactttgtcagccccgaagacctggacatccctggccacgcctccaaggaccgatacaagaccatcttgccaaatccccagagccgtgtctgtctaggccgggcacagagccaggaggacggagattacatcaatgccaactacatccgaggctatgacgggaaggagaaggtctacattgccacccagggccccatgcccaacactgtgtcggacttctgggagatggtgtggcaagaggaagtgtccctcattgtcatgctcactcagctccgagagggcaaggagaaatgtgtccactactggcccacagaagaggaaacctatggacccttccagatccgcatccaggacatgaaagagtgcccagaatacactgtgcggcagctcaccatccagtaccaggaagagcgccggtcagtaaagcacatcctcttttcggcctggccagaccatcagacaccagaatcagctgggcccctgctgcgcctagtggcagaggtggaggagagcccggagacagccgcccaccccgggcctatcgtagtccactgcagtgcagggattggccggacgggctgcttcatcgccacgcgaattggctgtcaacagctgaaagcccgaggagaagtggacattctgggtattgtgtgccaactgcggctagacagaggggggatgatccagacggacgagcagtaccagttcctgcaccacactttggccctgtatgcaggccagctgcctgaggaacccagcccctgacccctgccaccctccggtggcccaggtgcctacctccctcaagcctgggaagtcacaggaagcagcagcagtaaggacaaggggccggattccaggtcttcaacactggccactcctctgcttcctctgttggccccagatggacagtaaggggaacctccaatgtctctctgaacttaaagacaggagctggcatttatgacagacaaagaaagaagcccaggtgtcctggtgttctctgagacactctttgtgagcttcagtttcctgttctataacatgaacataagtgcttagctgccatgagggaaaagtaatgagagaagtttctagaagccactccagccactccttcctggggctgacaaaagggtgattccaagatcatccttcacccgaggtcctgcccaagcacaggccagatgcaagaatggggaaaagtctggtcctgatctccaagtctcaacatcctatcagtgactctgctccctgaccacacatcggaagggctggatgaccccaatcaaaagaaagaacaaggactctggttacccttgccctccacccatgtgtcataagagtaggctacagaggtgaccaggcctggcagttgaaatctctggaagagggaacatgtggggactactcagaggcaaagaggagctgctcctgcctccatggttgctggccactcccaccaactactcttagggaggctaagcagtctctgttttgcttccatggctcaaataataccctgggtatgcaggacccactataccttgcatttgctggtacacctagagagcttggctgtttccaaaaacaatcagggtcataaccatccatgcagacatggaggctcggctgaaccaggactcctcactgtctacctgagagaatgagcacccctcatccatctcagcatcaacacaatttccaggggacctcaggtctacctcaggactgaacgccacacctcaggattcctcctccttgaatctgagactggctgcccattctgagatggggatgaaggtaagatgccgcatcaccaggcacgccgcccctgacagctgccttgataccagctctctgtggaaacccccgaggagttggatctggagaacagctgggcctcctcactcaggacttctctcctgaagaacacgcagtgctaaaactgaggatgatttccctaatgcttctgcttggccttatggaggagctgctccttccttacagccttggggatggacttgcccacacctccacctcccctgagccctgtgagaggcacgactgtctatgccaatgaggctcggtggggggctctcaagtgcctgatcctgccctgggctcagagccagcccagagggaagcaactgcacagccccacaggccctccctggcactgtccccccaaccccatctcagagctcagagggtacaagctccagaacagtaaccaagtgggaaaataaagacttcttggatgactgac

SEQ ID NO: 42 - DNA, 1709 bp, Homo sapiens
ggagtcgaccgctcgggcagcgcaccgccacgagagcccgggacgcgggaaagaccgaaaggaagaggaagaggcaccggtggccatggggctggaggcggcgcgcgagctggagtgcgcggcgctgggcacgctgctgcgggatccgcgggaggcggaacgcacgctgctgctggactgccgccccttcctggccttctgccggcgccacgtgcgcgccgcgcggccagtgccttggaacgcgctgctgcggcgccgcgcgcgcggccctcctgccgccgttctcgcctgcctgctgcccgaccgcgcgctgcggacgcgcctggtccgcggggagctggcgcgggccgtggtgctggacgagggcagtgcctcggtggcggagctccggcccgacagcccggctcatgtgctgctggccgcgctgctgcacgagacccgcgcggggcccactgccgtgtacttcctgcgaggaggcttcgacggcttccagggctgctgtcccgatctgtgctctgaggcccccgcccctgcgctgccgccaacaggggacaaaaccagccgctccgactccagggctcctgtctacgaccagggtggccctgtggagatcttgccctacctgttcctgggcagctgcagtcactcgtcagacctgcaggggctgcaggcctgtggcatcacagccgtcctcaacgtgtccgccagctgccccaaccactttgagggccttttccgctacaagagtatccctgtggaggacaaccagatggtggagatcagtgcctggttccaggaggccataggcttcattgactgggtgaagaacagcggaggccgggtgctggtgcactgccaggcgggtatctcgcgctctgccaccatctgtctggcatacctcatgcagagtcgccgtgtgcggctggacgaggcctttgacttcgttaagcagcgccggggggtcatctcccccaacttcagtttcatggggcagctgctgcagtttgagacccaggtgctgtgtcactgaggtggtgcccctctgcctgcctgccccactgtgctggcaggagctgactgtggactggtgggctcccctctgggccagcacagtcccctcacctccggcagggctgctacctcctcagagtttcagaagcccccacatgggggctctaggaatgccggcatgctggtctttccgacctggtgctcttctgctgggggactgaggctggccctcattcggggtcgggaaccaagggtgtgtctgctctttccctccccatcctctggcagaaatcagctagacgctataccgtggactctccctggtccaccaccatgttgaagcccttggcagcctgagagctccaaggaacaagctgtgacaaccaggagccctgtctgtgggttcgtctgcccagggcctggagcccaagccctgtgttcctggggaagctggggacttgggaagtgatgggtgtgtcatgttgcgtgtgtctgtctgtgagcctttcacacctgtgctggcgctggaaaattatttgtgctcagctgacatttaacacttcctcccccgcttcctcctagccctgtgggcaggggttggaaacttagcactttatatttatacagaacattcaggatttgtcaataaaatattgttatatttaaaaaacaacaaaaaaaaaaaaaaaaaggaattc

SEQ ID NO: 43 - DNA, 729 bp, Homo sapiens
  misc_feature (648)..(648): Each "n" represents a nucleotide selected from a, t, g or c, or contains no nucleotide.
ttttttttggccctagagagtttattacaaaataagaaagagaagtctggggaaggttcactcatcatagaattttggcagttcattgcccaagatgactcgatggtccacaccggcagctgtaatagtgaccaggtagatgacacccccgcttgagccatcccggctcatggccagagcaatagcgtctgtggtgaagcgcctgcactcctcgggagacatgcctggcttatatgctgcatccacataaccatagataaaggtgctgccggagccaccaatggcaaaaggctgtcgagtcagcattcctcccagggttccatatacctgacctccttcacgttggtcccagccagctaccatgagatgtgcagacaagtcctctcgatatttatagctgatatttctcaccacatttgcagcagccaaaacaagtggaggttcctccagttctatcccatggagctccagctggtaggcggccatgtcggcacggcttgggcatcagcagctgaaccagagagtgcacagtagatgcgctcgtgcagcggggacagcttgtcaaacactcggttcaccacggcctcgcctgcagacactcgggaatcagaacccctcaaaacgcccccgtcaaacttccatgccatngatggtggtcccgtgtggactttctccgcccgggtaaatccccgttgggtgttcccgccggagcatcccttgaagggaccg

SEQ ID NO: 44 - DNA, 552 bp, Homo sapiens
tccttctttttcattacccacagtataatgctttttaactatctatccacttgacagcccaggattgccgcagtccatcagtccatctctcatgtaaggtcttgttcagggttggaagcacagacaggatgcctcgggaagactctctcacctcagaacactcaatccaaagaatgcccaatataccaccaggcacagtaaactcaaacaacagaagcaccgaagttcaactcagatatcattcttgcctatcattgaaaagacactaagtggaatggcctggggcttatatttggatggaaaaacagactctgaaagaatgtactggaaatatgcttgaagttcagcttcatgaaacgattcccctcaagtcaggtaccctgagagcctgtttctctcagctctaccatgctgccagtgggaaccaatgggctggacagtggtgcttcagggtaaacagaggcttcctatgtctgtttacaagcccagaatgcccttgagaggagccaggctaagaaaggtgtgatgagtcagtggacttcagagcaccaa

SEQ ID NO: 45 - DNA, 2445 bp, Homo sapiens
cgcagctcaacctgagctacacagccagatgcgagatgcttctctgctgatctgagtctgcctgcagcatggaccttggtcttccctgaagcatctccagggctggagggacgactgccatgcacctagggcttatccatccgcagagcagggcagtgggaggagacgctatgacccccatcctcacggtcctgatctgtctcgggctgagtctgggcccccggacccacgtgcaggcagggaccctccccaagcccacactctgggctgagccaggctctgtgatcacccaggggagtcccgtgaccctctggtgtcaggggatcctggagacccaggagtaccgtctgtatagagaaaagaaaacagcaccctggattacacggatcccacaggagattgtgaagaagggccagttccccatcccgtccatcacctgggaacacaccgggcggtatcgctgtttctacggtagccacactgcaggctggtcagagcccagtgaccccctggagctggtggtgacaggagcctacatcaaacccaccctctcggctctacccagccctgtggtgacctcaggagggaacgtgaccctccattgtgtctcacaggtggcatttggcagcttcattctgtgtaaggaaggagaagatgaacacccacaatgcctgaactcacagccccgtacccatgggtggtcccgggccatcttctctgtgggccccgtgagcccgagtcgcaggtggtcgtacaggtgctatgcttatgactcgaactctccccatgtgtggtctctacccagtgatctcctggagctcctggtcccaggagcagctgagaccctcagcccaccacaaaacaagtccgattccaaggctggagcagctaacaccctcagcccatcacaaaacaagactgcctcacacccccaggattacacagtggagaatctcatccgcatgggcatagctggcttggtcctggtggtcctcgggattctgctatttgaggctcagcacagccagagaagcctctgagatgcagccgggaggtgaacagcagagagaagaatgtacccttcagagtggtggagccttgggaacagatctgatgatgccaggaggttccgggagacaatttagggctgatgctatctggactgtctgccaatcatttttagagggaggaatcagtgttggattgcagagacattttctggagtgatccatgaaggaccattaacatgtgatacctttcctctctattaatgttgacttcccttggttggatcctcttctttccccacccccagacagacatgaggctacatcccacatggcagcgttgggtccacacctctgcacatctgtgtgctctggtccatggtgtgtaacacagtcttctttattactcattgccatactccctggtgtgctttactgagcctccatctcttcaattcagagttccaaacgtgcttcagtaactaaatcaatgggagagtatcggatttcaaccaggaaaagataaatccaccctgatgccctgacaccctctctgaaccctacgagcccttccctccttctcacatgctacctgtgcagcttctccttagatcattgtgtaaccatcactgccatcctgttccacacatggtcatcaccctacacccattcagcagccactccccattccctcttccctccagcacctgctaaccacaaatgtgctttctgtctctacggatttgcctattctgtctgaaaacatttcaatctcctttgacctgtgagctcctcacttcgagacttcctgcctttccaggcagaaccaaagtacaccacgtcaaaagcaatgataggcatttgcagtgtgttggtgatccacgaaaggaaaatcacggaagcaggatagaaatccagctgcagacaagacctcaggtcgatgaatcttgacaagcagttgagctgtttttttctactcacctaggacagtcaggcagaagtatgcaaaatgactggggctgattcttttctgaattgtcgcaaacagcaagaggacttgagtcctagcattaaagagttcaacatgtctaggtccaagaccactgttgtgtttgaaggatgtaaaaccctgctgcataggatggaatatttggagggaggatcctgaaaaacatgagggatcaaatagtcctcaactttctaggacaaagggagcagctatttgccatctaccctccagaataaagaaatcttatcattcaccatctaccctctagaataaagaaatcttatcattcgccatctaccctgtagaataaagaaatcttatcattcaccgtctaccctctagagtaaacaaatcttatcattcaccatctaccctctagaataaagaaatcttatcattcgccatctaccctctagaataaagaaatct

SEQ ID NO: 46 - DNA, 1401 bp, Homo sapiens
cgtattgctcggcccggggagtttcgccccctgcccggctccgcggcgcggaggatggcgtggaaacggctgggcgcgctggtgatgttccctctacagatgatctatctggtggtgaaagcagccgtcggactggtgctgcccgccaagctgcgggacctgtcgcgggagaacgtcctcatcaccggcggcgggagaggcatcgggcgtcagctcgcccgcgagttcgcggagcgcggcgccagaaagattgttctctggggccggactgagaaatgcctgaaggagacgacggaggagatccggcagatgggcactgagtgccattacttcatctgtgatgtgggcaaccgggaggaggtgtaccagacggccaaggccgtccgggagaaggtgggtgacatcaccatcctggtgaacaatgccgccgtggtccatgggaagagcctaatggacagtgatgatgatgccctcctcaagtcccaacacatcaacaccctgggccagttctggaccaccaaggccttcctgccgcgtatgctggagctgcagaatggccacatcgtgtgcctcaactccgtgctggcactgtctgccatccccggtgccatcgactactgcacatccaaagcgtcagccttcgccttcatggagagcctgaccctggggctgctggactgtccgggagtcagcgccaccacagtgctgcccttccacaccagcaccgagatgttccagggcatgagagtcaggtttcccaacctctttcccccactgaagccggagacggtggcccggaggacagtggaagctgtgcagctcaaccaggccctcctcctcctcccatggacaatgcatgccctcgttatcttgaaaagcatacttccacaggctgcactcgaggagatccacaaattctcaggaacctacacctgcatgaacactttcaaagggcggacatagagacaggatgaagacatgcttgaggagccacggagtttgggggccacagcacctgggcacacacccgagcacctgtccattggcatgcttctgctgggtgagcaggacagctcctgtccccagcgaagaatccggctgcccctgggccagtcccaggacctttgcacaggactgatgggtgtaactgacccccacagggaggcaggaaaacagccagaagccaccttgacacttttgaacatttccagttctgtagagtttattgtcaattgcttctcaagtctaaccagcctcagcagtgtgcatagaccatttccaggagggtctgtccccagatgctctgcctcccgttccaaaacccactcatcctcagcttgcacaaactggttgaacggcaggaatgaaaaataaagagagatggcttttgtgaaaaaaaaa

SEQ ID NO: 47 - DNA, 384 bp, Homo sapiens
acgagccgccgccatgatcatccctgtacgctgcttcacttgtggcaagatcgtcggcaacaagtgggaggcttacctggggctgctgcaggccgagtacaccgagggggacgcgctggatgccctgggcctgaagcgctactgctgccgccggatgctgctggcccacgtggacctgatcgagaagctgctcaattatgcacccctggagaagtgaccacgctgaaacccacccacccgctgtgctgaccatgggccctgagcgtcctaccccgaattcacgaggctgaggcatccgggagctggcgtaatgcctggccgcagtgtgtgtgtatcccataccccactctggaaggaaccatccagtaaaggtctttcagaacc

SEQ ID NO: 48 - DNA, 1011 bp, Homo sapiens
ggtttattttccagatgcaatcaatgccccagtcacctgctgttataacttcaccaataggaagatctcagtgcagaggctcgcgagctatagaagaatcaccagcagcaagtgtcccaaacaagctgtgatgtgagttcagcacaccaaccttccctggcctgaagttcttccttgtggagcaagggacaagcctcataaacctagagtcagagagtgcactatttaacttaatgtacaaaggttcccaatgggaaaactgaggcaccaagggaaaaagtgaaccccaacatcactctccacctgggtgcctattcagaacacccaatttctttagcttgaagtcaggatggctccacctggacacctataggagcagtttgccctgggttccctccttccacctgcgttcctcctctagctcccatggcagccctttggtgcagaatgggctgcacttctagaccaaaactgcaaaggaacttcatctaactctgtcctccctccccacagcttacagaccattgtggcaaggagatctgtgctgaccccaagcagaagtgggttcaggattccatggaccacctggacaagcaaacccaaactccgaagacttgaacactcactccacaacccaagaatctgcagctaacttatttttccctagctttccccagacaccttgtttattttattataatgaattttgtttgttgatgtgaaacattatgccttaagtaatgttaattcttatttaagttattgatgttttaagtttatctttcatggtactagtgttttttagatacagagacttggggaaattgcttttcctcttgaaccacagttctacccctgggatgttttgagggtctttgcaagaatcattaatacaaagaattttttttaacattccaatgcattgctaaaatattattgtggaaatgaatattttgtaactattacaccaaataaatatatttttgtacaaaaaaaaaaaaaaaaaaaaaa

SEQ ID NO: 49 - DNA, 1900 bp, Homo sapiens
acaactctcagaggagcattgcccgtcagacagcaactcagagaataaccagagaacaaccagattgaaacaatggaggatctttgtgtggcaaacacactctttgccctcaatttattcaagcatctggcaaaagcaagccccacccagaacctcttcctctccccatggagcatctcgtccaccatggccatggtctacatgggctccaggggcagcaccgaagaccagatggccaaggtgcttcagtttaatgaagtgggagccaatgcagttacccccatgactccagagaactttaccagctgtgggttcatgcagcagatccagaagggtagttatcctgatgcgattttgcaggcacaagctgcagataaaatccattcatccttccgctctctcagctctgcaatcaatgcatccacagggaattatttactggaaagtgtcaataagctgtttggtgagaagtctgcgagcttccgggaagaatatattcgactctgtcagaaatattactcctcagaaccccaggcagtagacttcctagaatgtgcagaagaagctagaaaaaagattaattcctgggtcaagactcaaaccaaaggcaaaatcccaaacttgttacctgaaggttctgtagatggggataccaggatggtcctggtgaatgctgtctacttcaaaggaaagtggaaaactccatttgagaagaaactaaatgggctttatcctttccgtgtaaactcggctcagcgcacacctgtacagatgatgtacttgcgtgaaaagctaaacattggatacatagaagacctaaaggctcagattctagaactcccatatgctggagatgttagcatgttcttgttgcttccagatgaaattgccgatgtgtccactggcttggagctgctggaaagtgaaataacctatgacaaactcaacaagtggaccagcaaagacaaaatggctgaagatgaagttgaggtatacataccccagttcaaattagaagagcattatgaactcagatccattctgagaagcatgggcatggaggacgccttcaacaagggacgggccaatttctcagggatgtcggagaggaatgacctgtttctttctgaagtgttccaccaagccatggtggatgtgaatgaggagggcactgaagcagccgctggcacaggaggtgttatgacagggagaactggacatggaggcccacagtttgtggcagatcatccttttctttttcttattatgcataagataaccaactgcattttatttttcggcagattttcctcaccctaaaactaagcgtgctgcttctgcaaaagatttttgtagatgagctgtgtgcctcagaattgctatttcaaattgccaaaaatttagagatgttttctacatatttctgctcttctgaacaacttctgctacccactaaataaaaacacagaaataattagacaattgtctattataacatgacaaccctattaatcatttggtcttctaaaatgggatcatgcccatttagattttccttactatcagtttatttttataacattaacttttactttgttatttattattttatataatggtgagtttttaaattattgctcactgcctatttaatgtagctaataaagttatagaagcagatgatctgttaatttcctatctaataaatgcctttaattgttctcataatgaagaataagtaggtaccctccatgcccttctgtaataaatatctggaaaaaacattaaacaataggcaaatatatgttatgtgcatttctagaaatacataacacatatatatgtctgtatcttatattcaattgcaagtatataataaataaacctgcttccaaacaac

SEQ ID NO: 50 - DNA, 3287 bp, Homo sapiens
ttttttttttttttttttttccaaataggcactaaatccaatgacgtgtcattataagagagtggcaggagattcaagatacacagggaagtaggtaagggtgaagatggagccagaggttggagtgatacggccacaagccaaaggaacacctggatccaccagaagctggaagaagcaaggaaggattatcccctagagccttcgcagggagcttggaactgctgacaccttgatttctgatttctggcctccagaactgcctttagagtgtgatcccatttgatggctatgacaaccttgtgaagcaggtacttccctcactcctgttgtacgatggagctggctcagacattcagcagtgaaagcctggttgctcagctctgcctcccatgttccttctcttttctctccacagccaatctggtcaattcccttcctgagcatttctctcacgcggtgcactccatggatgtggtggtccctttcctttgtctcccatttgcacacacaagcatttctcctgttaatgctgtgatgcacgtcactgtcaacgggtaccttcaatgccatgttgctgattctctctttcttcctgaaaaaatttgaagatcacagtgcttgagaaagtgtagatccaacatccaaacatagttgccattgggaaggaactgcctttagcttctgtgaacagaggagtctcttctgaggtagggatgggagttcaggactctgagaagataacatgtcataatttccactgggttctctgttgaaatgtttctttagtacaagctgaggcaaatcacttcccctctctgaatttcagtgtcctcatctctcgagtgaagagaatgataatgtggtcccaggagcctttcctttactacagaggaggcaccagcaggggaactctcttggcacacagttggagtcctcagaaaatgttgattctcatggactcttctctgtctcttcaaggagcctctttcaggagggggcctggcttccatctgctttctgacatactttgcatggagatctgccctctcctgccaggctgtgctcacaccaataccaagagatcacgagacgccctgccagcaaatgccctggaagcacatccccttcatgcccctggcagtcatctaatgtacacacaagatcaaagcagctctcaggtggcctgttgcagggcacagcacagttctgcctatgccaaggcagatgctgggcccttccctattgtgttcagcacacacccattctccagggcaccttttctgggcattaatttatccagtcagttaatatggattgcacagcctgctatatgccaggtaccatgtggaccccatcacccgtacccaatgcaggcccctctagtgggcaacccttgctccacacctccctgttgggctgctcgagactgtcaggtcgggctcaacctgctctccagccctgtttccttcctatccctttcctgagtgttagttagccccagtaaatctttggccctgccaactccctctcatggtctgcttcctggaggacacaatctgagacagtgggttccagagtggtctgagaaagcaggtggtaaaatggggtcttggtacaggattgccccgcatctgcccaactggcaacaaggttcccatcttcgggagtaggtggcacgcaggcggctccaggcacaagatggcaggctagttgccagacctttggtgttagaacttttgctgggatggccggcttgtggagaggaagttcctggcaggtgaggagatccaggcagggcggatgcctggaaatgaaaactcagagaacagacagtggtgagtatgtttcctggatgacccacaggggattaatgagagaccaagagcaattaacaaacatctaaaaattaaccagaaacactggagtcttcctggtggtttacaaagtagcccccgatccaggcaatgggcgagcagcaaagtctgaagaacaaacccaggacttgctaaggtggctgaactccaaagacaggtgaacgctcagccaaggcaggtctgtcatgccaatgacaccagccctgttgggaaaacctgcgtccctgatacatggaacaggcacatctagaaggtctctgaatatctggtctccccagatgcccttgaaacttctgagcccgcagcatcagcccaccccctcccatgaagcgctgcaggcaccctatcccgaaggagaaataaataacacaagaattttccccacaggtgtcctccctcccaggagtggccctcaccttatcactggctgccaggtagggtgaccaacagtcccagtttgctgagtgaattgcagtgctaaaagccggcaagtcccagggaagcaggaggaattggtgagctgactgccagacccgtgaccagagtgaaggtgcagcgcagcgccatgcaggcagggtgtgctgggtaatttggagtgcttaggtgaatactgagtccaaaacagccctgcaaagacacagaagaacaagcccctgtgcggacgaggtctctgtaatcccagcactcaggaggctgaggaaggagaatcgcttgagcccagaaggcagaggtagtggtgagccgagattgcaccagcctgggcaacaagagcaaaactccgtctcatctccagcatttctgcttcctcaagcttctccagggagaagtaggcgcatctcactgagggaagaaagacagaggactccaggttgctcaggaggctcatggaacagtgcaggctccagaccacgaggcctgaattctggaagtagcagcggggatgcaggacgaggagccgttttgtctcatcaggcactccagaggcagggacccagaacttggttatgaagtcaatgcgggagactgcaaaagaggcgttaaaaaaacggtccctctggaccccactggcaggcactgacggagcggccaggacacaggagagcaggcctggggggctcagccctgcaagactcagcctagagctgcatggaccccagtcaagtgttcccgcccttcttgctgcttctgtgccctctgggggaagacactggaggtgcagttaggtcgccgcgggaaagtttggactcttgcctggtggtctcgtcccgcccctcctcttcctccctccggttccttttcctccttccggttcttggtctaggctgcctgtctcgagctccccggccttgtcctggttggctggcgcgggacaggatccggtaaactgaacagcgtctccttgtggcaagt

SEQ ID NO: 51 - DNA, 3276 bp, Homo sapiens
ctggacttccccacatctcccctgcccctcccacgtttccatagtccaagggccagagtaaatgaaaatacagcagccgcccaagcaatggggcccatgctggggcttcagtcatcagcatcttcactggagtctgagttagctggcatcataggatcatcaatgagtgagaagtccctttctgagctatcatagaaatgagataagtcatcatcatcttcttcatcctcatcgtcatcctcctcaggttgcagtggtggcaaccgcaaggtagtaccagaggcggtagtcactggtgaagaggggtagccaggggctctcaagcctggatggtgatggtggtgatggtgggggtgggggtggtggtggtggtgatgaagcatggtgctggagtctacatgaggggatgatcggtgcaccacccatcacaaatgcataaaaggcaaagatgcagaagtggcactgctgtgacccaaagatgacacagactgtaggccactactgctgtgttggaacgtgttatgcagagatagagacccagtgcttccaccctgcatgaggccatcatcttagaaggtctggtcgcatctacgggcccgcttcttgctgctctctggcgcaataggccctggcaaaacccggttgaacaccgtttcagtgtgatgaccctttttcccgtttctagagttagctgtctgtactggttccattcccaaacagttcaattctgccttattattttttttttacatctttgccacttctgttttatgcgatcctccatatacgctagaaatcggggatcaacagaaactgtggatgaccctgtaagcacatctccagttcagcccggcgaggggcatcctcacccaccagcaaagtaccatccaccttattgatgacagggatccgggtctccaggtccacatcaaggtgattaggctcttccatgcactccacctccagctctactagcttctttctgttccccttcttcttatgaaacagtggatgtccatctcccattactccattcgccatcaacttgtgcttctggaatgttaacttcaatccttcctcatctttgatttgaactgtaaactccttttcatccatgcctcggcgaagtttggtgaactgggctgccgctgtgctgactgcagatgcttcctcctctgccatggaagctggactccttcgtggcgtggggactggagagtccccatcttctcctggggtcaaagagggactgtctaataaatggttgcctggggccaaaattcctcctgttaccatttcctggctcctacggctagaaggccacttccctgagagtacagcctggcagacgaggtcaatacggtttatcaggacacgatccttggccctgcagaacgtggggaccggcgaaggcgcgttgtgaagcagccttcaagctgaaagaaattgcacggcgggagaaacaacaacgatggacaaggcgtgaacaaactgatttttatcgagtggtgtctacgtttggtgtggaatatgaccctgacaccatgcagttccattgggatcgcttccgcacttttgctcgactagacaaaaagacagatgaaagccttaccaagtacttccatggctttgtggccatgtgccgccaagtatgccgccttcccccagcagctggagatgaaccccccgaccctaacctgttcattgagcccatcactgaggagagagcctcacggactctctaccgtatagaattgcttcggcgcttacgggaacaagttttatgccacccccttttggaagatcggctggcattgtgtcagcctcctggtcctgaattgcccaaatggtgggagcctgttcggcatgatggggagcttctaagaggggcagcccgccatggggcagcccgccatggggtgagccaaacagactgcaacatcatgcaggacccagacttctctttttctggctgcccgtatgaattatatgcagaaccatcaagcaggagcaccagctccatccttgtcacgctgctctactccactgctgcaccagcagtatacctcacgcactgcctcaccactgcccctgcgcccagatgctcctgttgaaaagtcacccgaggagacagctacccaggtccccagtctggagagtctgactttaaagctagagcacgaggtggtggccaggagccgaccaaccccacaagactatgagatgcgagtatccccctctgatactacccctctggtttcccggagtgttccaccagtcaaactggaggatcaggatgattccggactctgagctggacttgagcaagctgtcaccatcttcttcttcttcctcatcctcatccagctccagctccagcactgatgagagtgaggatgagaaggaagagaagctaactgaccagtcccgctcaaagctctatgatgaagagagtctcctgtccctcactatgtcccaagatggattcccaaatgaagatggagaacaaatgacccctgagcttctgctactgcagctgcagcctctatcttcatttgttctctcttgtagctgcgctgatacgctgttactagacgccgaagcctagctgttagggcagagcgaggccagaataaatggcctggctgttgggtcacctgggcttcatctccatcaatcactgagatctcctcatccatcatcatcaagggatcaccctcatcatcttggtcctttgggggaccttggagtggtttatatcaggatcttcacaatctttatcaagtcaacccttctactatgtcagagaagttatccaacactcgatgttctgctgcaattgctttgtcatctggtcggccagccttttctaggaaacataaggctgggtctgccctcatggtattatatttctcatagccatgtttaaagactccaatgagcagcgacttgtcagcctcatctgtcccaccaagttgttggaacctccagttgatccactactgggaaccatatgtcaatctcactggcaatcgcaccccctaacaccttttctgcttggtctccataacctcctgcctcaggtagatagcattcgtacccgcaacagtacctggttacactgatgtttcaagtgcttcttataactttcatcttggaacaaagtgtcagggttatatttccggatccaatctgccttatggatatcaaaagtgctttatgactttactttttttcctttgcgtccacgaggcacagggatagatagacctgaat

SEQ ID NO: 52 - DNA, 198161 bp, Homo sapiens
gatcattacagaagtaagtaagtatcattagtccagtagccagccagtccaacccctactttttcacactcctgggcccaaaagaacagaaacaagcccaaagcaatcctccattctttatgaaaagaaactggtcccctggagatgtgttcctgccatcactcctccagcccaatgagagagaggggacagactccccgccgggatgagggggtctgtctgtctgcagccataccaccctgaatgcacccagtgtcgtctcatcatgaaagcaagctcagcaggggggcgcagctcgatgggaaatgagggggacggccgcaggccacatggaaaccattaggttaggctgaaggggacccagtggcaggtgggagcaggactgcagtgtggggggtggctctgctccctggctggggggaatcctctgccccctgcccgtggacgagaaaagaaagagctcattccattcagtcatcttccacaagacagacaaatgtccaaaaaactttgtttttattattaaaccttgtagtacaaacctgaaaagtaaacaaaaaactcgcaataaaccacatgaagtctccctcccaagggaggggtgcagagcagcgctaataaattaaatgtcaaactgtaagccataggcagaagtttactgtcaaaaagagggaaagtacacagcaaggccatagaaaccggacaaccacattggaaaacacttgactgtttctgtaattgttaaatattccaaaacagttcagtcttctgcaacaacaaccaacaaagtggatcataggacgttcctggcagtcaccactggcaagctcagtgcaatatgggtagctacgggattgatgaatccaattatgaaacaaagaacagcttgtgaaaacagtttcccttttttattccacacatactgtacacacaaccggagaagggcaacagctactccattattatttttttgttgttgttcagtgatgtaagcagcacttataaatgttacaagaaaaaccctgtaagcatccaatccaaccgatgaagaaactgaaatgtaaggcttttcttcatcttgtcttctcacccccctccccaccccccaccgagaaaaaggctcaagtatttaaaacaatttacaggcatatgtacaaaagggatgggatttttttttcttttttcctttttgttacaacatgaagagaaaaaatagacaagatgaacgcaaatgcattttcacattcaaaaataactgcaggcctcctagtggctctctacatgatcataaatgaaacaagttttaaaagaaagattaatgctgacttgtgaaggtgtcaaacaagaagcggtgagatggagatggaatgttagaaagattgcacgtcgatgacaaagaagcacttacggcttccatcacttttttttccttttttttttttttttttttaaatcttaaggatgctattgaagggttttttgataaagtagccaacagcaccaaaaaataacagaatggatttcctaatgaaatcaggcacaggtctccctcatgtgacccctccaaggcaggcagtcttttccgtcttcctcgctcgcttttcttctttcctggaacagatgcatagtgatgtgctggtggagagcccactcgctcccgtctcctcgttccacctatggttaggaaacaacgtccgccttcagctgccacaaccgcccagagaaacaaaacgggggtgccccggcttcccagatcacaagctcatctggcacacggcagaagacgacagccaaagcaaagccatttcaagtttcgtgtgtgtgtgtgtgtgcgcgtgtgtctcctatcccttctaaaaaatctgctcacatgactgatggtttttaaatttgttctccaaacttcaccctcttcaaaaatgggttaaaaagcctttttccccccaacagttacaaaaaaaaaaaaatcaaaaccaaaaaaaaaggcttttgtcagccatggggcaatacaaattaatacagcccctccggggtttttaaaacagtgactatacggcagtttccaaaatctgactgcagtatctaggttttctaagtacaaaaaaaagttcaacagtttaatgctaaaacaaaattagttctctaaaaccagaagaaaatcttctttagagctagtgcaaagacagcttgaatcctacagcaagtactccaaactagaatataataattacaaaaaaatatatataaatcgaccacgggcgttggcatcttcatgatgagctcgaagcacttttggatgaactggaggctgacagacgggaggggggcacgtccactgtcgctctcttgcggggacctctttttggtgtgggtttactgagacagttctcaatgctgccgtttttaccagacactttgccgcagatctgattgaccagactgataatctgttcctgtttgggggtgaaaggaagacacagttaacataccgtattaacaagagctctgtccctgagagccatgcaggggcaagtttagggcagagggcagcggtccccttcaccacaccaaccaacaggttttaaaataaccccgagaggctcagatgcagtgagtctccctttcccagctcctcctgatgccacatagcaggcatggccgtttcatcctcatcaacaccctggtccaccatgctttgcctgctcataagggcagggctggcaggggagcccagagcactgcctctaccacggagcactcagcaaagagacccaggggctttgttacatcctggatggtgacacaaatacccaagctacttgactcactttagctaccggccactgaacctggccatgcaagtaaatgcaaacacttctcaacctatacatatccttgtaattcactcaagagaatcatttatctgtcggcaccaaaaactgtgtttgtaactttcacacagtacatcctataatcatatcatttttaaaaacaacatggggaggagtagcaaacgtgcatcttatgagcatctctctgggccacgggtggctgggaaccatgctgaccctggcaggagaggaagccagccatggaatgaaacatctgagggcctgatctctagtcctctgaaaagccctcaagatgagggtgagaaagtgacagctggctcccatcacaagttaaaggtgccttcggaaggcggggcggtccacacgtatctgtaataacaccatagtcatggctgcttgaggtactgatgataaacactgataaaggataagtggatgagctgccataaaacccatttaggcggctactgctaccttaccataaggacaagtgaggaggagcggcagtgtgcggttacaggaggacaccgttccctcccctgcgtgcagctcgacaggtgggcagcacctgccccagaccagtgctctcacactaggctcggcggcaggcggcccaacaccctgctcagccagcctgcaagggccagagacacaaatggctccaaactccccagagagcttcaccatccatgagaacccaagccatgaattcagggatttgcaatctaggtgcaccccccaccccagcaagggtgggtgtttaaagcagactgtcccgggtcagcaggcccagacatgggtgatttgtgtactgggcacactgggaggttgagaagattttgcaatggtctctgtttacaaggtagaaatttcctatttaaaagaatgggccaggtgtggtggctcacgcctgtaatcccagcactttgggaggctgaagcaagctgatcacctgaggtcaggagtttgagaccagcctgaccaacatggtaaaaccctgtctctactaaaaagaaaaattagccgggtgcgtagtggcgggcacctgtaatcccagctactccagaaactgaagcaggagaatggcgtgaacctgggaggcggagcttgcagtgggccgagatcacgccactgcactccagcctggcgacagagcgagactccgtcttaaaaacaaaaaaatgcacagctcaacaggggacagaggcacagacatgcttactgaactactcagccactacagagtatgcagtttccaaatacctttgctcctaattcatcaaaaccaaccattaggtctcagacagcccctgaatgccattcttttcccaggatctggtcacgtcacacatccgactacagaaacaggctgctggtgagaggtacaacccatgattcacagagcgctttccaggcagccagaggaagcctccccgtgccgccgcctgcacccccacaaggtgccagagccatgctcgtgctcagccgcaaaggcttcgttatttgcaactgtgcctggacatttgctgctaaggtgaaggagggacacagcaggtgcttactgccttcacccagcatgctctttgaaacaaaacagatgcaaagagttcttcttccagctctccgatcatttagctcaaggcttatccagtgagacccaccacttggccccactgcctgggcccccagacacaccaggcccctcacagtcatacccgcagcacccaccccactcagtggcctcaaatgtgcaatgaccacaatgtggcgaccttcctcgtaaccagcctcatcagagtctgtgggaagcacacgtggggaaggcgggcagagcaggggagaggcactgctgccaggagttccgccactcagagcggcccccagctgcacaggctgtgtgttgttatgacccccctctccagaagagcgtggcacctgcaggaaggcaccgggatttcacatcatggggcccgtcctgccccagtgtccgcagacacttccagctctctcagcctgaaggggctggtgtcaagttagtgcagattggagaggccactgccaaccatcccactgtgcctgggacaggtcacaaaaaagggtctgggtctaaaccacagtggtgcagcccttgggaaagccgggggggcggctgcaggaagagcctcagccctgttaagagcccattgctcaaatccaaatgcccgtgcaggaaccccgctccccctgggatcctaacatggggcctgaatgggtttagggcctaagaacagggcacctcaggcctgcagagccctgactacccgccaggcacagaactgccaggccggagtgcctacatccagccgggagcagggaaggcgccacgctgccgccctgccctaccccgcgggcagggactgacctcatcgtagcggtacatcaacttcagccctcggcaggacttctgtttctccacgtggcgcagagcacactccagacagaacacgacgttttcgttctcttgtaccacctgcaagcaagagcaggacacccgaaggtcaggaggcagctccacagcgccctgggagggtaaggtaggagcacgcccggccgggcagccaccacacccactgcccgcgccagagtagccccagcacccaccacccgggccaagggctttgaggactggaaatgctggaaatggactaaaacgaaaactgaccaaacacctggaacatggtcttcaactaggaaggtgagtaactgaccacctctgagttagacctgggagtggccctcaagtcccctccagatttctgctggagtttcctgggagaggttcagtcaccaccaggctgctaaagacagtgaggggtgcgtatttctcatctcttgagttctgagggctcctgagatcctgtgtttgaaaccaccctagtgctggaatagatgtggaacatggaggactccaacttaggcggccacccggggaacgcacccttgactttccagcagcaaaacaggttctcatggtggtccatgagtggctcacagtcaacagagcaagcggcgtccaacgaccccatgcaaactcccccaaaaccctcaacatcacagattcctgaccgctgtgacgccgatgacctcacccaccagccccggcccccttgggcgggctgtccacaaagcccacagctgtcccgccagtggacaccctgctgcctgaggccacaggagagtgctgggacagagaccctcactgggggcctgtctagggttgagaggggccggatgaaaggaaacagccacctggcttctgccggagggctcccatacttcacgctgactccaagtcctattctaattctgagtttgaaaataaggaaaaattcagtcttaacactcaagaggagaagagtcataggcctttctcagaaagcttgaggggaaggacttgttttcgtctgcggtgtttctaagcaaggaacagagaacacgttgtaggagtgtgggaatgccacctactgacagaaacaagaccttggagagacacggggccaaggacaggaagaacaggaaacacatcaaatttaaattcacaaatgtattagtaatccaagcaatgcaaactgtcaacgtataagtcaaaccccaatttttgcctatggatttataacgggttttttttttttttttgagatggagtctcgcactgtcacctgggcgatggcgcgatctcggctcactgcaacctccacctcccgagtagctgggactacaggcgctcaacatcatgcacggctaattttttctatttttagtagagatggtgtttcaccatgttggccaggctgtgattggcccgcctcagcctcccaaagtgctgggattacaagcataagccaccgtgcctggtttttgtttttgttttttttttttaaagagacaggttgtcactctgtcacccaggctggagtacagtggtgtgatcatggctcactgtagccttgaacttctgggctcaagtgatacccccgccaccacacccagttaattttttgtattttttgtagagattagtctccctctgtcacccaggctggtctcgcactcctggcctcgagtgatctgcccaccattgcctcccgaagcactgggattggcctaccatgcccggcctcacaatacattcttcttaaaataactttcaggctgacaggaaatgccaggtgacaactctgaagtttctgaaggatggcttgaaaatgaggccacctggtgccacctcacagggacagaccagcttcacccccaggtgtaactaccatacagccctcagtgcatggaaatgaatagcgtgttccagcaagaggatggacagctgggcgcagtggcccatgcctataatcctggggctctgggaggctgaagtaggcagcctatgggtaacagcaaaaccccatctctaccacaaaaaaaaaaaaagttaaccaggcgtggtggtacacctgctgtcccagctactcaggaggctgaggtgggaggatgaccaggaggttgaggctacagtgagacaggatcacagcacgcattccatcctaggcaacagagcaagactgtctcaaacaaacaaaaaaaaaaaagaacagagagagagcacaccaagctatgcagcttttatcagtgatgtttataagatactttgaagatctgggaaaatgcttatcatcattttcttttaagaaccaaatggctctaggtaatacattttgagaagtctgggggaaaaaaccagacagaaggaaatctacaggacaggaggcagggcggtcacggactgcatttgtcccccatcaaatgcaaacgttgaacctccaggatctcagctgtgactgcagttgggggtagggcctctaaagaggtaaatcagctcaaatgaggccatgagggtgggcctatctgatacaatgtgatttgcgtccttaggtaaggaggagatgaggacacaccgagtttttagctctttcaaatgttacaaagccctgatctgacgatctgacgatctgactcatccgggagaggctgtgtcctccctcttctacagggcacgccaggactcggggtgagacggcatgacacagtcacactgggaggccaaggagagtcgacccgggtctcagtcctggcccaccatggacaagcagagggacgcagaggcactggcctctcagcgagtgtgcagccgaagggggcacctgtgggacacaggcaccacacagcatatggggtgggcacctcctaagctaggcttctgtactggagatgtgaggcactgtggaaagggacgaggcccggggaggcaggtcaggcccttcgggcatgctctctgttccaggctaaggtgtgtagtgctgtggagccatctgcagtgccagctgggcgtccctacccagagtgtgtcagggcagctctctggtgagaggtcaaggggagactggaagaagcatggcgaggccacagccatccagtcgccatggaagggcttttctgagcccacctctgggctggaacaggggtgagcagggggaggaggtgtttggtattaaccccaaagctgaggcaggcaggtgggcacgaggaagccagcagggcacagtcgagaaggcaagaggaatgcagcctgctgtggcctggagtggctgtgccagaaaagcatctctgatcccagatgggacaggaggaacatcagctttcaccaaggatagattctgaagtcctcgggggctgaggcagatcatgtagctgagcaggaccaggaaaccaagaacagagccaaagggcagaggccatgggcccaggtgcaccaggcacaggccacagggaatggcagacgctgcccagtactggaaacccgcccctcactgcctcagaaagaatgggtaagagcagagtgcgtgggggctggagtgacaaagtagggcggagagggaggccacctgctccccagggaggaaggacgcactgcaggaccgagggagggccacgcgtgggcagaacagagggacagcctctgtgtggcctggtcactgtgggtgaggcagccacctccggcggccagaagctccgccgaggtcccacagccggctccagagatgggagcacagcaggtctcctgggcagagagcgccctccctcttctgggggcaaccccggagctctcaggccaagcactacatgcgagggcgccggcagggccaggcgggctcaccatggacaggtagcacaggtgctggcagatctgacacctcctctctgacgtctccaactgcagccactttcgaggctttttcttcccgtccgccaccgtgctgctgccatcgtggctgccatagcgtgcggaggagtggaggccagcctcgaacagctgcctgcgctgccgcagctctgtatccctgccagacacgggagacggcccgcacctttagtgacggcctgccatgctcaccagcagaggggacacacgcaccccacaccggcctccctgcagacacaccctcctgtcaggaagtgaggcctgctcggggggtgagcccccgaagggcagccgggtccagctctctggcgtgggctctgggggtctgttacctgagctcatccaggagggctgagatggtactgagagtgggaccgttttctttttttgcttctgcttgtgcaatctggtagagtaacttctccatggagaatggcttagctatatggcgacgcttcatttcctgaaagaggagtcacatccctttagggtggattttcattactaggcagctgtcaaggttcttcttggtggagggggcaggcaggctgtctgaatttctaaatcttgaattgcatttagattaaaaactcttcaaaactttgcctccctgtgagaaaggcaccacataccaggaaaagtcatagcacttcgccgctacccagaggcagctgccactccctcacgatgggtggaggttctctgtccattctaagcaattaccttgagcatcttcaacagttttccaatactggaggggtctgtcagtaacggtctgatcaaaactctttgtgatacaaacaaatccctaacaacttttcattcctagaagacctttcaaccacgtcttaagaatttcaaagacatattccaaaaggaactattgacaaatagacacgcacacgcagggatgcttctgtgtgcgctcacgcacggcactcacagggatgcgggggcagcaagcgggaggaggccggctctgctcaccttggcggtctcaaagcccatacttgtccactgggtggtagcaaagtgcacggtttcagacacgctgtacccacagcacactttggacacaaaggatcccgggaagcagacgacaaactggccactctgctgcacggtcctgtgcaccttgatcccctctttgcacagcacctccggggagatctggggagacagggccaggctgaggcacccctccctgtgcgcagggacacctgcagtcttcaggtgacgtatgcgcaccctaagaggcctgctctcaaggagataagattgttttatgtggaaaataaaaagacgtcattcataacacaagaaggagcttctaaactgcactggtccaagagtgatgacaggttcatgcacagctgaggacatgatgaccacacaggcccctctgtccccacgtggcaatgccagggctggaaacaggacaaggttacacaaccaggaggctgccgggctcatctccagagccaagtaggccacaggcccacaggctgggcttacaaaggagtcccccgtccatctcttctctaagatggacaggcgggaccggcagggtcagcagaggccagagaagctggtcagaactcagctcaaagcagcacttcccaggaactcaccagccccatgacttcctgaaaacaggtgaagaagcctttgtgctcattcctctcacatgcccagaaggtaggagcggcgggcacaagaaatcccagggcccacagcagcccacaacacaaacaagccccaaaacagatgcaaaggccgtgcaaaaccccagcgccctgtgcaatctgatggaaggtcagtttggcttttgtgtcagaggacctttccctttgcaccctggggatttgttttgctgtgtcctcattgcctttgaaaggcgggttcatgggaaaccatgttcaagtgcctaggaggtcctacagctcctgctggaggcggtggctgagtggacgcaccatgacgttgctttccagcatctgcagccctggggtgccattggcttgcagcagggtgtggaccacatcttccagcttgttctcctcctcagcaggaatgcaatacctgggtcattgagagacacaagagacaagcagagacttgacaagggcctcctgcatgtactgggccacccccgtcaccctcagggacccgagcacacgagaggctctgctccacgccggcagggatggcgcactggcctggctgggtgcctggtcactgctggctcccatttcccatggcagcagtgccacgtccacctagcacacagccaaaccacagtgcatccgcgttgcgagatgctcatcttttatggagatctgacccacctggtgagccaaaaagccttcaaaccacaaacagatgttcacaaacccctagaaatcagaaccagacacactgcggcctccacgagcctcttctgaggctccagcactgcaccctccttctgttaacagaggccactgcaggagcagcacctgataatgtcctcacaaggaatacgtggctccctcggccctccagacaggaacagtaaaccctgccctctacaaatgcacagagagttggggaaggagccaggctcatgcacatgtgccacctcaaggccaactccttggcagatgctgtggtgaagtaggggtcaggggatagctaggggcccccagctctgctccccactggagagttttacgtgttaggacccagcctacccggcatcaggcacatacagcaagacacacaggaggatcaagggctcataggcctctgtcagagggtggcctggggaagtggtggctcacagaccctccagggtataaccatggcaggggtcctcaagtgtaagaaaaggtgggaggtacaggtagaaagtaacctacacggcctcctcacggcaatcacagggaggggaggaggttttgcccatgtccttggagcccaccagggccacacttccactcacaacgtgtgacgcccctggtgtcaggctcacagcatgaatgagggggatgtgaggggaggccccccgcaaggcaggggtgcagggatggctgccctgcccctgggtgtctcaggctgtctgaggggctcctccccaggcaagaggaggacatcagtgtggagaggggcctgacaggtcttcaggatgctaagccagtgaagccatcaaccaccattaaacacaaagatgtgggccagcagctcagggcaacaccgccagcccctccccacagcccccgccccccaggtccaggcgggcagcaactctgcagcccctatgtgtctgtgatgaaagcatttctctctgaggccaaatcctggtttcagttgctcagtgaaggaagtattttttttaatgctcatgttattttcaatgccaacatattctgttactgattggtaatttaaatacagggtttctaacctaaatcacatgttttaagaaaaactacacaccatcatgttctctgatcctatccctgccttttctttctctcctgtcaatgaggttccaggagtgagtcttcaaaaagcccacacagggtatcacattttgctatctgtgactcaacgtcaagccataagcaaacccacacggaagaaactcgggcctgaggtcactggcctggggatgaccccagaacacaggccatgccacagccagtgtaactcctccacaggaaatggccacgctcttcttccggaggcaaaggcacctctcggaatagtcctggctgtcccctccccagctggtggcctggcccggctaagccccaaggctcctgtcagtccccgctccacaggcaacagcctgggcttcccgggcccatcactctggacccactgcaggacaccatgatcaccgtccatggcacacagacccatgtgggaagggagggctccctcatgtccacagcaccactcaccagaacagccaaaatgaggaggctgcagccgacgctggctccaaagagggagaacacgagtcctaagactttgtttattttaataaagaatgtttaatcaccccattagggcaataaacacagtcagcatggcatgaacagcatgccggtaaacgatcagacgacaagacatctgattatttgtagtcatttcccatctgccgccgtaaacaaagacaccaaagagtccagcctcgatcagggatgggtgcagtgagagtcaggattacaggcggggacccagcctcaatcagggatggctacagtgagagtcagattacaggcggggacccagaacacctcgccaggcaacagactccacagggtacataacgcgcgtgtctccacatggcaggaacgagattcccaagtcaactctactccccacagccaccgatagatgaggaaacactggctctacagagaggctgaaaataaccaatcatgaaataccacggtttatattcagttactagagggctgatgacacggtcactactactggttagctttgtgtggcacttttactactgttccttaaccctaaggtgaaaataactcttggaaatccacaagaaaaagtgactaatccataacaaaacaaaacgaaacaaaacaaaacaaaaacagacgtaagtaggtaattcttaagggaacttaaggaactaaggggaacttaaatggccactaagcatatgaaaagatttgctcatcatcagacagtgttacaacattctccagcaccccaactcttccaacagaggtaggtgatcccaggcccaggcttcggcagggaacgcaggacaggcctgaacacagagaagcaagttctcaagcacgtggaaccacctggacaagaagttacccacaggccccacttcatgtggtaatagtagtttctgcagtccctcccttcccgcctggggccagtactcaccaaatgcagtcagcaccagtgtgtaagtagtcaatgtatggaaggtgattttggtctcgagaccagcatgaggtagaaaagaccatgccaatatttagccagggaatagtcactcctaaaacagaaagagtgaaaagggcatttttaaaagctaggcaacaaggtctcaaaggaacagtaagtaaaaatctctttcttccgctaaaacaagaaggaaaagaaatgggactcaaagccagacaaaagacagtgagcagaaggtacctactctttcctgcttgctctacagaagtgggagaatatgaacaccgcttcaaaacatcaggagcacgtcggcctcatgagggaggtggccgcaggaacctgacctggtgaggaatgccgaggaaccggccgcccacgggccgaagcccccaagcctcaaggctgaggaccagaggcgccaaacccaaaaacccccatcagggccagaggcagaaagcaagaaagcccctttgttggtaaggcctctgagcagggtgagtagggcacagggctccttggctcagctcagaaatgagtcaggttccaggacccggacaggttcctagccactttcgccaaggcctgggccttcacattcatggtgaccacaacctccatgaccccttggctttccctgaagtttgcaaagcatccatccgtcccttacgagcctactgaccatcctgagaattcatgatttcaagcctgcagtagccttaaggaattgtgacttcagctttgaaagcagcaatttcaaggttcaaagttggcccctaagcttctcccagctccagactctgccatgcggttcacctttccaccttttctactgacttcaccaatcattatgttactcctttcttttctaaaaatcaattttcactgtatgtcctgtaagcctgaagacgccatccctccccggcagtgcttagaagggatttcccagccctggttctcagcaagtaggactcatggacacagctgccacaggcaggcggccacagtcaggcttaccaggcacagcaccgaggtgacgcaggatggaccctgtgttattggggaggacggtgaggttccatccatgcctgcaaaggggaagacgagggacgttacaaactggcggggaaaggatgcagtcacatccccaagaacctggacgagagaatcccaggttacctcgaaaagggttctgattttcctactgggaatccactgccgtgagtgttggtgtccaccttgccgcagtgcactgccacgtggcagtccttctcttccactagcctccagtactcttgctgcagggaacaggaaagggctggtcagcacccctaaggtgctgcagccacagagcacagttcaacccaacaaaactgggacacgaatgcctggtgcacacacccctcagaacagacgctctctttgcagagtgtctccagcaggacgctaatgcagaaagcaatgacaggtcacctccaggcatatcctcagaatgccagaaagcagggtctcacccatgttatgcagtgttattcccaacagccaaaaggtgaagccaccaaagtatcccatccacagatggatgaacaaaatctactccgtccataccatggcctattactcaacttgtaaaaggatgtcagttctgacacatgctacaacatagatgaacctggaggacattatgctaagcacggtaaccgccaattatataaagcttccgaagtgacttttaatatgtcccatctaaacaaatatgggggcaaagaatgggtcagaacatgctttgactacaggcaagcagcggtgcccaggctcccttgagacaagcctccccacgcagtcaccttccactttgttctcagtgatcactccagaagcactaagtcctcttccctcgtctcacaagccttggtaaagctggaaccacatttagggaagaagcctaactcataagcccccagcatcatagggtccagttaagctccacaaagcgctactagcaacaccaaaaccactttcctcaatgctgtgtgacttccacaaagagggggccgacctggcggagtcaagctccacaaatcaagaacgaattccacattaaatgactggattccctcaacagactccctgagtgcccaagcctgctgcgtatttgctgaaactgagggcaaccagcgtctggtgcgcctgtaaagacatgggaagggaagcaagggactgctcccaggtggtggccaactccaggggctgtccaccagccttttttggaatacagagcacaagaagctaggcaatccaggcctgaagtttaaattctagcaaatctcccctttgtgtttaaatatttacacaactgctagagcaaaatccagactttcagagggaattaattcctgaataagaggctgtaaaatgagctaagttttcttgcgcatcatggataataaacttctgcacctctggggagatgcccacaggacacgtgttgtttggcaataaaggcctcttcccaggtccaacgctcagccccagaaagccaagtgtcctccgcctgacatctctaccacaaacgcaacgcgtgctctggaagcagctgcggaagccacacgtgtcctagaccacggttcagctgacatcgtggctggtggtgggtgaggcagtggcggctgcagcacggtaatcatgaccacaggccgggtgtcaggccactgcgtggcattcaacagccgcacccagggtacacagtgtaggcagcccctgcacgtaagcagagacctaggtcctaagacgatgaaaatggcgtgaaaggtaaacctctattccccacactaggaagggaggggtgggccacagggctggacatcctaagctctgacaattgctatcaggaggtggggcaccaaacgccacccagggagggtgaccagctgtcctggtttgagcaggtttgaaggtcacaggtctaaaacctgggcaaaacaagatacctgaacccccagtggtcagcatgtatacacggggcaaaccgaccttggattttatttgaaacaggtggcattaaggggaaaaaaaaaaaaaaaaaacacagcaaaagcctgtcacacactaaaagatgaggctgtggtcagcaaatacctcctgttccccggccggcagctgccctgaaccagcagtccgggtttggtttctttccctttccacgaccaagcgctgctgagagcccaccgacgtcagcagctggaagttcacacggactcagctgggcactggccgaggggaggtaaataaacagatccggtctctgtcctgcagcgccgcacacaaaaactccccctaattggtctgggcacagaagtgctcactgtctttccaacctcatactaactcaaagaagagagttggcagaagcacaaaaatggcaatctgccaatcccattaaataaaaaatagaagagaagaaaaagcacaactgtggtttcaagggattccaaacattctcttgcataacagacacacagaggatggggtgagaaacagccgggtgagcaagcaggaggagacagtgacggggagcaggggacgtgcccagaacccgtcccctgcactcggcagctccccaccttcattatagtgtttttggcttgtgaacaagtttagatcaacctaagttaaaacatttggctgccctggtgcacgctcaacacagaggacgaactcagccccatctgagtcctttccgttcaccgagctgcaggggtcagggcaggacaggatgtcctccagctcgccgaggggttcccacaccatgagaggcagcgtgaggggccccttctctcacctcgatttcggctggggcaggctccttgctgaaacacatgctcatgatattcctcgctgttcgataaaaagttgttagagaaacagaccttccctgaaacaaaacaaaaaacagtaaagcttcagaagcaaagctgaaccctactgcaaatgaggccagacacctgtcatgggccgctgccccttggcgtccctgcggctgtgggccaccttgtattctgagttaatgacaggcagagaaggaagaaatatattctctaagaacccgcagtgccaagaggagtgggaagactccaccaaggatcaaccccatgagggccaaattgttctgccaggaacagaggctgccgcccagaggccctgagcggacgcacagcagaagcgcggaaggcccctccaaggctctgctgaaaaagcagcttgtgctggaggcagaatccctcagctgacaaaggctgctgcgggccagcggagaagctatcagcagctatgacctgatggaactcgtgaccagggatcccacaggagagaagctggagagacagaaactggtgcgacatctacaccctgagagtccttgccatattaacacctgccagggcagcagccttcactgaggttgcgacctggtcgccttctctccacagaaccacctgctgtcccctctgcgcctcttcttcgatgcccctctgttgccctgttcccaataacttccagaatgatttgcttgctttgataaaacagctgagtcagtttgggaatccggagtcagcaccttcttttacctaccacacgaaatgtggtgcgtttttcagagggaatccatctaagacccttgctatttctttcttacttgaccgggcacatttgttgcttgagtccagaaatatctcctgagcacctatggtgtactaggtcaaatcctaggggctggagacagagcagtgcatgaaacacacaaaacctcgaggagcttccattcagtctggggaagacacaggcctcaaacacacaaatatgggatgggaggaggtgccaggtgtcatgtagagtgggggagggtggtcagggaaggcttccctgcggagcactggacaccgcagcgtccccctagaagtgatagggccacaacagggagcagcagatgctttctgccattgggtccacagtcgtagtcggcatggagacattggcttgtgcctttctctcctgcagcaaaggaactagatggggttctaactacaggaacgtacttccatgcaaattccaagccgctcctgatagtctgtttcttgtaaatataaaaaaggagggactgaattctgcaccaaggcagagtgcaatgagtggaggtgaggatgacaccagcagaccaaagtcagcagccaggacaccggtgccacagagagttgcgtgctcacggtccctacccgtgggcacacggctgctgggggcttcgccatggccaccacgcagagctccactatatttccgtgatgaaatctagaaatacccttgacggggtggatttaaacaaatccaaacctcttatttgaatcaaacatacgctcacagaattggcctccttcagtaaaaagtaaaaacgttgacagtttctcatttcaccagttggctattcagtcacaggattcactgagtggctttacttgacaaaggcttctcagtaaaacattcaggaaacaccaaataaagttcctcagagcttacagtctctgggtcacacttggcaggctgcatccagcaacccccacaccgcatccccaccaggcagccttgggcaatgggagagcagactcagataaaagggagccaaaccctctcagggtctcaggccagaaaaactgggtacctctttccagagaagtgtgcaaggacatgagatgcagcctgaggcgggtctgcagggcctggacttaaagtgaagcagcaacgccaggagtcaagtcaacccttcctccgtatttctaagatgtgtgatggtatcagaagcccgcattgcctcaactacaaggccaggccagagcctgcagtcaggcagccgtgggcacctgagggtatggtggtgtttagtgataaccaacagccaattcccaatgctgccgaaacccactagccacacactcccaccaggctcacgagggctggagcagagaacgcttcccttccagtgaatccagaactgggaccacagaggacaagtctgtgccgggaaactcagcagagacttcaacttagctgagctcggccagctgggccccgggtgccccgctacccactggcaggctggagaagggaggaaaccccaagccttgcttcagagccaggacagctgggagagctgccaagaggagagccacggactctgcctcccctgcttcttggaggggcgagtctcctcaggatgagtgtgctgccgggagacctggcggagacagggaaacgctgcatgtttcagtttgctggtttctccccagctcttccctccacagcgtgtgaatggtgagattcattttgatggctttatcagggatagctctccacagagaggacctggcaacgctgggctggcagtgaggtgagcggatagaaaacagagaaaacaagcgcacagagtccactgacggtccagccagtgagaagttcagctggatctgggcagctgtcgagcaccaggatgaaacggaactggagaagcaggggaaacgaagcatgcagcccagttacttatccctggcatatggagatgtgtgcacgtgcatgcaacacgcacacgcaagccagttaatgaaaaggaaacccgaggccctaggcaggcggaatggactcgtggtatcttcgtggagtggacttcccctccctcactgggtctcctgctgccccatcaacgcacccacaaggccctcactaggttcctcgatattggacttcccaggctccacaaccaggagccagtacatttctgtttattatgaattccccagtctgtagtatttcagcaacacgagaggactaatacagcgctatcacccagcacagtggcccgccccctcatcaccccagggaatcagagaacacaccgtccagtgcatagcacgctccacttcctctctcattcctcccgcactcctgcagctgggagtggctgctctgcggaggcccctaccttatagatgcacttgtggaagtcattgaggacgcctttgtcctcctcctcttccttgaccacttctttttcctgagcgaagagtcgccgccggccagtcttcaactgggcctggcccacctccttgagcttgctgcggaagccgttcctgggggccacgccgtggatgagcccattcttgggctcgaagcggggcagagggtggaacttgtggtggtcgttctctgtgtggccttccagcggccccttgcgcttctccaggatctccttctccatcagcacctccttctccagccgccggtgctcctctggggacagggagtcgtaggagagtaggtactggcagtaggcctcctgcagcttggccagccggtcctgggcagttctggggatgcgcagcatgtctgctagtttgttccattttttgaggtcagtcacttgctgcatgccgcccatctcattaatcagccggaaaaagcaggccaggtcgagctcacagccccctgggacagcgaaggggaaaaaaacgggacagttagtgaaagagacacgaacaagatgttcctcattcaacctgtacttcttgaactcctactatgagccaggactctgacaggctctggggtgagagtggtgaacagcagactcccggtccacagagagaagggcgttacaaaatgatgggtcatgaccacttgctacgaagagcaggtggaacgagggactaccattttaggtggggagcgtctgaggaggcagcatttaagctggggcttggctggaaaaggatgcgagctggccagacagacatacagggaggaacatcccagtgtaccatgtactggtacatgtgttgtcacatggaggcgggtgtcatgagaagactagctccctggtgaggagtgggtaggggtcctggctgcacccacggcccagcgtcacctagaatagctttgacacatgcttgttaccaactcccaattccccttctataattcccaatgcccacccactcactcactcaacttcacccatccacccactcactcacacaaaggaagtctattttccatcctgctggatttccagagcaaagagcaacacctgcgtgaggacacagggcagcacatctatgcctcgtccctcgcccatccagacagcgggctgcttctcagtgcataagctggtgctcagtgcccctcctgatcaggccacagagcagcgcaaatgcacatcaaacctgggcaggttttaacgcgcgcccagtggcttttctagatgggaatggagaaagcaacctccctcgggccaaataaaggaaggggggtaggggagattttccaaaataaccatcaacaaaatactaaacaaagtacaaattaacaacgttttaaatctttagagtgtggggatatattgtttttaagtaataaaaggtaaagtgtgcacggatccagtccaggcagggtcgctgcacataccaagcatgacaggacccactaggtgaagcgtctgaaccacctcggcagacacagcacacacagagagcgagttcccagcacaccagcaagaccagggatggggacacagcagcctgaattccactcacactaaatggcaggacagtggactgatgtggttgtggagaacaggggagttggggtaacatccatgagggaactgtccccagcctcgacaggagggacctaagaactgagactccacaacaaactccaggtctcacagactcccagagtcacaggtgggactcacggtggctctggctgacaatcgggagttcttcctccgagggcaggtgggtactgtctcaacttacagaggtaggcaccaaaacgagtcccccaaccaaaacaagtcctccaccgtccgagtgactcagaacacaggtcacagaagggaggaaatccacactttcatatttcactctaagtagattataacgcaagagcacctgaaaatcacacagcgcttgcaagaattcttcatggaatcctcatccgctgcgatcactcccactcagggccttgaggctgctacgtggccgagccccttccccacccaactcccgccagcggcacggcggctccctgggacctgcggtggaagtgaacctacacagaggcagaaggcacatctgctggggtggattttaggctattacttcaaagttattaagtttctaccactgtcagatggctgagctcagaccccagccctgaggccttgctgggtcacagacaggtcagtacccctgggacagaatgtcagacgccttagacttctgggtgacggcaacaagcataagcacaccacagggaggcacagtatggcttttgtcccagggtaagggagtcgagggtaaagaaaaacctactctaaacaaaaggcgctgtcactacgatgtcaagtgtgctctcgaggctccatcatccacctagcagaggagggaaacttggaatgtttccctcctgtctgcaggtctccaaaggcaggaggacttggtgcggttccatcactgactcagtcatcctgtgtcccaagtagtcatggggcgtggtcagcgggcgtgggtgcacgcgtgtgcagagcctgctccctgcactgcttcctatcacgtgctattcccaacagcagagcacaaaccaagaactcttgcaagttaaggtgactgtcactcaggcatcagtcctggcaggcacctgctgaggggaaccacgaaacctccatcctgcctggaagcctatcttgctgccaaatccctgacacttaaatgatggctacacgtctccatgcctttgaaaattgaggatctccaaaatggaggtgtggcctgtttcctcccatgggtctagactgatggggttgcaaccttacctggatgcacctcactccacagaatccacttagccttaacaaggcaagttcatcctcaccctgtgtccccagtggcaggactgaagagaggatgacagggaaggagggctacaggggaacccaagaggaggatctgcctgcaacccaccctgaggagcaagggtctgcatgacagcccagatatgcattcactaaggatccactgtgacaagtttccaacagccccagccagagctcagaaaaaaggtctcagaaaaaacctggtctcagaaaaaaggtcaacagatcccttgacctgtggccttgacaaaatcgccagagaaactgaagctcagaggaagaagagacaaggctgagcaggataaaaaatggcctacaggaccctagagggctatgggctgcatggtgatccctccaaattcatatgttgaagccctgacctccagtacctcaggacatgaatgaatttggagacagggtcttcaaaagggtaattatgttagaaagaggtcagtaggatgggccctaatccaatgtccttctaaggagaggagatgaagacacagacacacatagaggtaggaccctgtgaggacacagggagaaaacagccatgcacaagccaaggagggaggtcttgttggtttcgggagaaaccaaccctgctggcccctagaccttgggcttccagcctctataatccagtgtggaatccagaggggcagcgctccccactggccccccggcccctgctttaactccagcagttgtgggtaggaggtgacagcccaggggaagcaaggggcccagacccagagtgggggctcaccccagatccaagctcaatactttttttttttttttgagacggaatctcactctgtcacccaggctggagtgcagtggtgtgatctcggctcactgcaagctccgcctcctgggttcacgccattctcctgcctcagcctctccaagtagctgggactacaggcccccgccaccacgcccggctaatttttttgtatttttagtagagacggggtttcaccgtgatctcgatctcctgacctcatgatctgcccgcctcagcctcccaaagtgctgggattacaagcgtgagccaccgcgcccggcagctcaataccattcttatcctgccaccaacgcccaggacctgggaagaagggctgcagggggaatgagctgagaagcccactactcccgagacagggaagcggaactggagctttcgcaagggaagagaacgtgaagactgtgagggaactgcagggatctgggggcaggagggcaggcaccaccccctgaccccccgcccagacctacctatgagcgggagctcgtccatggtgatgccctgagatttgaggtgcttcttgatgcaggccagccgctgcacgttggggccccagcgccggcccagcttgtggatgtgctgaatctgcgtgacaaaccgcatctcatcgttgagcttgcactcgggccgccagtccggaggggggatcaccctgcacatcccgaacttctccacctgagcgcggaccgactcgatgtagatgagcggatcgtggaactccttggcggagggcctgaggacggggatctcgtccatggccgcccacccggccttgccgccgcccttctcggccttgcccgagtcctgcggcttgtgcacggactccggttgcgaggtagaacgattttcacaggaggcgctgtccgccttgccatgtgcttgtctgcctggcgtgctcttcccggccgtggcccgcttcggccgattcctctccagactgcgctccggcacttccttcttcacgtgtccgttcagcagacctctctcggccggggccttcttgccagggccttcggcggggccagccgcccctttcatcttcttggggggcgactgcggcttctccgcctggtgtgcctcttccagtctcctcttggagttccgcagcccctcccgcagctgcaggccctcccgcagctgccgcccccccacctccttagtgcatgactttgggttcaacctgccactgaccttgaggccattgacggcgggcccagtggacttggacgcccccccgagggatagcacctgtttgcgggtttttgcattgctactttcagttttccctgagattgtgtggttgacagcggaactgggcttgtggtgattgggtttggtgtccttgaccagttctctcttggctttggtgtatgtgacagcccccttcgtcaccgtggcagtgtacttcacagttttggatggtgaaggtctgacctcgcgcatctttttggcactggttacacctgcacccagagatgacattcgagtgactccgtttaccttagaaacctgtggagcagcagaagcagaggtggaaaaaaacgcagaattagtacctgccactaaaatgaccggcccacccgtgagaaaggaccctggatgctggggatgaacagagccagcagcctgtagtgtgataagaagagatgtggaaataccagcaaagagaagcaaaatacacatccaagaattaagcagcgatgtccactttcagaatccactatatacctatccttcgtcacagaagtatgcaaactgccccaggcgcttcctagcggggtttcctgggtgcattttcacgttcccattgctcttccaggaaatttggtgtttcacaatgaagacctccccacgtgccatgcaatcacctgtcctgagcttctcagagttgatgacagcaagatcctgcttccttgggggaagtggagacagacacacacacatatccctgttccaagaaaagtcatgtctgctatttctgtgctccacatagcagcatgacctgcccacaggatttagaaatctatggctaaaaaaagaaggaaaacaaaaatactatggaagcaaaagaacagcagtgctcatgtggtttggctccgggtggcaggccaggcccagaggtgtggctgcaaactgtcagcagctgctgtctgctttccttgtggagacgagccctggacagggccaggctggatggaagagggatgccccgacctcactgttgaagcaacacatgccaaccctcgtctgcacacgcgcttcctatattttcccaccgtttacaaactgtcccatgtatcttccaccctggacaaactttcccatcaggttctatgggacctgggcaaacagagacagtcttacagcttggacgccgtggtaatcttgggacacacaaacgtcagcgaaaatggggagcgacaatggcagacactagaaatgcacaagcttcaaacaagaataatgaagggaccccaatgggctgctgccagacatgctggtttcgagaagatgtcttctctgcgtcacaatgtggccactgccccatcacttaacaccttgggcattacttttcgtctatgatatgaggttaaagtcagggacttcagggttttataaccaccaccatctccaaaggaagaagcctaaaaatcacaaaattactgagaaacacagaatactagccccctcttctccccaacagcccgagaggaaggtgccagggtcgggggagcctgcacttcctggtcaggagagctggccacatgcagtgatggcccagagggtactgaaacaccagtgccaccacaaggctgtgcaggctgctgtcacatggggacgaaggtccccagatggcgggtaatgagtcttagtgacctttgtactaaacctaggcctggcccaggaccccccttaagtgggggtggggcatggaatgaaacttcccaaaggcgcctgtaatcccagcactttgggaggccgaggcgggtggatcacaaggtcaggagattgacaccatactggctaacacggtgaaaccccgtctctactaaaaatacaaaaaattagctgggtgtggcggtgtgcgcctgtagtcccagctacttgggaggctgaggcagaagaacggcgtgaacccaggaggtggagtttgcagtgaaccgagatcatgccactgcactccagcctgggcgagactcttgtctcaaaaaaaaaaaaaaaaaaaagacttgccaaaaacatccaaaccagtggctctcagcatcccctagagggctgatgtaaacacatcactgggccctaccggcagagtgtccaagtcagagggtctgggatgggactgagaatgtgcatttctaaccaagtcccaggtgatgctgtgtgctgacctggggaccgcgcttggaaccactgaatgaagtatcagtgaagtttataaaaatcaaaaaggaaagaagccactgagacctgtatttctctatatgccaccaattaagtgcagtccaatcaaagccacaaattcttggtaggacatcatctcttaggagccaggcccatggaggcctcattcctagagccagatctcaggccccatgaagaggcagaagcgaagacccaggaatcacactctggctcttaaaccatgagtcacccataaaaaaagtgggactgacagacggtctggaataaataatgcgaaacccttttggagaggaaaaaaagcacctggcaatgataaatttaaaacagatttataaaaccaggggtaaggacaaacagaaatattccgtggtaagtactgttaatctgcaagaggaggtatagtgaggaatgcaaatctcttagttttaattgttctttcaaatgcttccactaaaaccaaaacaagacaaaacatttagaaaaacaaaagcaaacagtaaactccagctggggctgatctttatttccagcaacaaaggctggtggggctgggtgggggtgggggaatgggcctcagggaatccaggaccttggggaagggctctatctcaggttcagacagcaaaagacaacacctctacagttggctcaatctccttttaacctgtaggggtgcaatctgtttcagccctactcccagcacaagagtctccttaaggagacggacacagtgcggcttcgtatatcgctaatcaaaatggcaaactccagatggtgccggacataacccaactcctgtgaggttcaggcatcagccaccactacttgctgaggtttagttcagtgttttccaaacctggcacccctaaaacccttaggggagcttcaaaataatgtaaatcccttccctctagattctgtgctaattggtgaggatcaagaaagggaatcagtgtttaaaagcctcagatgtctcagtgttcccacaaatccgtggaccctacccttccctaacaccgctgtccaaataccagagtgctatgtctctcatattctatctcaaataagagtgtaaggcctttggttccatccattctggcttctcgggggcacctgagttcatggctagcaatgctacagggaagtaaattttcaacacagctgaattctatatatcactatcttcaatggcaaaaggaacaccttgtttacatctttctgaaaacctaaatactgaattattggcaaggtatacattcaaataacttgctttatgagagaaatgagttgcaatattttccttcttattataggagttatcttcaacagtatccacccagatatcacacacgcatgcccatataacaagctcaaagactagatggatctcacccacaacacagaccagcgaagttcaaacaattacgaagactgaaaaaggcaagtgtcactggccatcttcctcctcgaaacccagagggtccgtgttctatgcccaccacgagaggccacaggggagctgaaaagctaacataggaagccccttaagctgctccatgtgtcctaaaagggagaaataaaacagaaccaacaacccagccagcaccaccattgtggggaaacctgggacccaccaatctaacaaaaggacaccccttttcctggcctggacttgtctataaggagccaacacttaatcagtacaaaaggaaacagaagaatggaggaaggcattgtcttaccttgttaccgaaggtctccctcaacccacctctgtatcaattaaaaccacacagccccagttatgcagccagtgcactacaaggaaggccaccgctgcacgtcctgagggattccacagaagagcacacacaggaagtcatctgaactcactgaagaattagcgccgacgtgggctacagcaggaccctccattgaatgacaatacatttcagctgagcagctttatacataagtgcttgaagttactccttctctcagctctgttgtggatttctggcttctcagcccattgcccccagcccccaacccagctctgcagaaagtgaggtgtctgcagcgtgtgctccttggcccacagccatccgtcacctgtatctcaggtgatcccaggcacacggccatgagatattaaagcaatccctcctagtcataagagaatggtttcaatttaacaggcaaggttgagagcattttcaagttacgttcggccagatgagtactggcaacaatacctcattcttcttgcagaagggatataaggtgagagatatgaaagtccaggacatcaaacgttcctacctgactttgttcttaataacagaaattccatcttaaaaactgtacccaatccacactctgtgtgcttgctttaagaatataaaatctctcccctccatccttatgggtttttctccaccccaccaccgacacacacaatatttaaatcaactcagtatgatgacagatgaaaaggagaaacatgcacttccaaggcagagcagaagatgagaaatgactctgatgtttttggttaactaagcaaaaatgttttagtcgttcaagattatgacgctgtcctcagttcaacctcagattcactggcaagttcttcttctccacgagagggagccgttgagccgaggcctctgccagcctttcaaaacagaaccagaggcccagagagagaaacagttggtggctgggggtagtccatttgcactttaaaacttgaatcaaaaacaaagagcctaaacagaagcgaaatgcactggacagacagtgagttatggaaggggaggagcagcctgctcaaacactgaccgcagcagcagatgggcaggagcctcctagccaaggccaaggccaaggcaaatgtgctctaaaagagatgcctgggttccactgggcaatctagatgtacctataacctctcctcccactgaaggcaatgtaactgagtcacaaataccccaccaccagcaagtgcaattcaaatgacaaaataatgtcatgagaagaaaacctttaacttttttaaaaactaatatgattttctatgtttccttctcaatagccgtattttccagaactttaaaagaatattctcaattccttggccctctctgaatcttactagggcaggatttttctgcaaggcttgtacattttcatatgaaaacctcttcagtgacagtagcctatagctcaatggaaggtcctgcaaaaccagtgggattagccagttgatcattttcttctcacactcagcctcagcgtaagaaatgagaatcacatgtggccacatctggttcaatatcctggcttacaaaccacacaaatttctacacaagtacaaaacctgctcatgactctcttggaaaactaatacttcaaaacccttgctagaaataaagctcgtctgttggactatcctaaacttgttactttctgtcactgcatgtaagcagaagtactactgcaggaaagcaacagaaaaacaccatttgctccttggtgagacccttaccatacaaccaaattattacccaggggcactcccagccccatgacaatgcaatgttatacaggcatgtgcattccatgacaaagacagctcatttggtataatcgagagtaaacggccggggccagagccctctcaccaagaaaaaggcttaggtgaagtacgcactggtgtgttctaactctcgggttctagggactccataaatcgcacacactatcaaatggcattgcccagttcgcacgaggggaagtggttttagacttggaagacaggtgcatgcacccacacagttcattatagcaagcagagcaaaggcacttctcggcagcaccccctaaaaattacattcctccacatttcaatacagtcacatttatgcttttaagctgaacaataacaaaaaaaaatccacatatcatatttgaaatgaaagatcagagtatcctctgggcccatatctttcatgcagttgaaaagatgaaaggtcacagtctaatcacttgtatcaagcagtcacaagggaatctacaatttgcttttactgaccttattttcagagtacttaactaataggatctgagggtttgaaaattttccttttatttctcacaatgtccctggtataaggagttggccagactggctccaaaggaataatagggcccaggaaggttaaatatcacatctcaagtctcattgaaggtcagagtcagagccaaattagaatctggagccatgggtcaacccatctgggctggttagactggaacagggaaggaggaggagagggaagagggagaaagtggggaaagggtgacaggagaggatccccgtcaacacctgcaggatgccctgcatgagcacatggcgctccctgcaaggactctaccctgagccccggaagcagctgaaactcctgcactaactcagaggacagaggccggctgtgtgaggggcaccccaggacctctttcctgcacctaagatcctgcacagggaacaggtcacacgaacacgccatggagcatgggggcaggcagggccatcccaggctaaggcagtactttctgttcctcctcagctctttcctctgtccaactgtactaattcctctcatccccttacaaatgaaaaccttgaactgaatgaaggccaagtgctgagagtgagctctgaccagctgagatgacaggcgtatcccacgcatccctattcgtgaccgtgcaagaggatgtgcgcacccgtgtctgtccgtgcatgagaacatgaacagtcacatgtacatgactcaggtcctctgccacccttcattcctgcctcgccatcccaaggatgggttctcagggcagaaaggcaagatctggaagctcacctggatatggcctccagttctgatgtggcccatgagaattttaccacaagtaaactaaaaaaactcaaaaaagcatagtgggatgaatagaagataaacaaaaacaacttaaccctactctaggattctgggaaaggagacaggatgcagtcacatggtgtaatcactgtctttctgtctttctccctgggttgcttctaattctgttctctttcatgagcaaaaaccttacacattggagagttctgtacaattctccatcagaccaacagcattgggaacagcgggggagtgaagaatcacagacccaggaccaaagctcggtgcctccctgggctttgtgcctccagtgctgacaatccggggcccaatggttaagagacgccaggtgagcacatggtgtggcccaattccacaccgtggctgttgtctctgggaaaactgaggtctgttttggccaacagtggccagtgtttaatatgtgctaggtgtgtgtggactgtggaaatgtaaatgtggtgattcttgccatgcccacccccccaactgcatactatttgctaggtaaaggttcacatgtgcatgcatacatacctgtctgcctatgtgtgactatagtcacatgttcacgttcagagagaaatatccacaacgtcaccaagaatgagaaaggccacctctaccgcaagacgaaatcgagtattttcacaccacaataaccatgtaagtcactctgcaacactgccagccaggaaatctcttccgtcccctctacaacttcctctgaagctacctttaaggatcatagcctccagtctcttctagggaagattttaaccctctatttttaactctgtgaggaaagctcatcaatgatcccatgacttagcggatgttaaaatggaggggggaacaggagcacgaggcatcagtgaaatgccacctgtccggggacaagccctcagctgtgtgcctgcaggaacctgcccttatccccactactcatccctagggttgtgagaaatcaatgtccaggaatgggaacatctggacagcaataatggccaagccctgagggattcttcaaaactgcctcaccagaaccggcattatctgtggccctgttgggggatagcgggtggggggacagcgcaggacaggcaggggcaggaggtggtcagggtggcagccacctacactctgtggatgctacagcctgggactcaaatgccttcagtggaagaggtgccacccagccacacccagttccacagactgctcggcagtgcacacagcatgcacatattctgcttcaaaggccaggtggtgaaatgttaacttgtcacatcaaaaagaacagaaaagtagaccaggatcatccattaacagaactatcccatttgcaggtgtgtttcaaaacctaccctgagaaaaacatgttccctgccactctaccgctcatctggagcccagggtgggtgggtgggagaaggcttaagtaaaaaagtgagttcactttcttggtgaatgcagtggcacccagggatgaatgcaaatccaactgatggatcttcgcaggacaaaaggtgcaggcgcctgcagctcatgcaaaggtgcgctctgtctgtccctgtcttgcttctgggcatcacctcctgcttcttgagccctctgaagatgaatttttagcttggtgaagtgaagtgggaaactggggtctggcacacatgtaggcacccctgctggactttacctgtttccgtaagtcctgagccgaccgatgcagaggggggtggtgatgggtggcagcaagccccttggccgaggaacccgtggagggggccgctgcggggtggttagctgaagcctgctcccggcggctgtcagcccggtgatcgctgtgcttctcctttgcgggagtggcctctttgcttttgtgtttttgaacaggttccttctcccgtgttgacctgctggaaccattgaaaactagaaaggaaggagaaaacaagaatgaaatcactaccttgaccactaccacgcaaactactgatatggtttggctctgtgtccccacccaaatctcatgtccaactgtaatccccatgtgttagcgagggaactggtgggaggtgactggatcatggaggcagtttcccctatgctgttctcgtgataacaagtgcgttctcatgagatctgatggtttaaaagtgtttcccacctcacgctctacctttcctgctgccatataagaagtgctttgcttccccttcgacttccacaatgattgtaagtttcctgaggcctccccagccatgcggacctgtgagtccacttaacctcttttctttataaattacccagtctcaggtagtatctttatagcagtgtgagaatggactaatacacctctactccctgaagtcagaaagaatcaaccatcaaatgtcagagcgagactctgtctcaaaaaaaaaaaaaaaaaagtctattctcagatttaaaagagatgcattttgaggccagagagctactgacatgcatgagttcggggcgcagctgctttatctgacctatcagtgacaacagagatgaagaaagggatgatggaactttgagccagacccattttctgttcctaaattcaaaaacagcaatagctaatagctagtatttcttaagtgcttcctataagccaggggaactatgctaaagtcctgaagtacattgagcctctgaatcctcagaacaaccctactggacaggacacttacagatggagggggtacgtgcctggcacaggccatgccacctatccctggcacatgaagtcagcctgcctcccaagcccaccccatccaccccaaaccccaggtggctacaagtgagaatttccagtgagcatggtgcttcctacccatgaggcagagacttcaaaagagaacagggatgcttggggtttctacagaaaaccagaaacaccaacgttatgggtttatccttctgctttacagtccctccccatggaataaacgagactttcacatccatttctctggaacccacaggccttgtctccccacaaacagtccaaacagggcctgtttcttcagggaaggaggaagcacaccctgttcctgggttgcctttaggcagatcagcaaggggaagctatagtgatcttttagccatcatcctgccagagggagttttcaaaaggttactgtgtccactcatgcatctggcacttgagcagctccaggccatccccaccccaaccaggactggcagaacttcaggtagaattccctcacccccacagcagcagatgaaagtgaaaattattcctcctttgagttgtaaatctcttcctattggcttgcagaaggggaaatcaaatctttcctcctctaaacatcttacctgtctgtcctttctgaaaactcccttttccccaacattcaatctcacatggaattttaagagtcctttaaattatattaatgtcttataaattgcaaatactgtcctcttttgccgtttactttttcatttgctgtggtgccaaatctgctaacaaatttctttgtttcttgctttcgtgcttaacctacccttccgtatatcttctcccagttttatgaaagtataacaattaaaatggtacgtttacagtatgacatgttttaatacatgtataaagtgattaatcaagctaattaccacacccaatccccttatatacttttgtgctaagaatatgtaagataagcaacttgagtatacactacattattagtgactagtcacaaggctgtccagtagatctccagattttctctctcccttcaaaccaactttgcatgcaccctttcatcaacatttctccattccaccacccatgctttcaaacggtaaaataatcttctaagtttccttctaattgttttctaattaaactgcttggatttaattctttagtccaattgtcatggtataagatggagatctccattatccccatctggattatcggttgtgagcctttatctcaaagttccttccaacaccagtgattaatagattttaaaatactgaaggaaagaccaggccacgtcaaaatatgggatacaatccgacgttgcacaagattctactggatactctcagttaacacagaaaatggagagtttcaaatggctggcatttattctaagtaactacccattgtcagaaaccatcaatcatgcccaagctggcagtatctgtgctagctttcaagacaaattaaaagcaacatccgtaagaagtcatacttcaatgtgattaaaaatcaagccaagggaacatgaatctaggcaattcttgactgttcaccaattttctaaagcagtgaacacagcttattaaaacataggaagtagttgctttttttttaatctccaatactcctccaaacttctctgtgctttttcctgccattaagacatgtctcatggtgaggcctgctacaaagaagcaccagttctataattacttctctttattcacttaacaaaatattactatatgggtttcccgcccttcaaaacattatctgcagctcattcccagctctgttgtttgcagctgggcaagttatttaatcatcagttttcccatctatagactggggaatagcagatgttccggtaggtagaacatctaccacaatgtctggggttcagtaggtacacagtatttgggagacactatcactgcatgtttaaaagggccatctcaggttactgcacaatcagattgtgggcaaatctctttttgcctcatatccctccctgcagacagagtataaagaagggcttcaatgcagacaaacactggtctcagcaagacccaatacaacctcctactcctctgggtcattaatttgtccacactgaccatgcctgttacgtctcctactcatgccagaccatgactgagagtctgtggacaaagtccagcagagccaggtgcctcctaacacttgccagtatcactttcatgggaaaaagaggagtagctaatcacctgcctgagcaaaaagaaatacaacactgaaaacacatcccaattttccactagcgacgtatggtcagatcagtggatctcaaaggagatttacagacccttcaaggacctagaaacccttgcaggagatgtgctagggtcgaaactatttcataataatacaaagacattatttgcctttacaatggatagacatctgcactgatggcacgaaaaatggtaggttaactataagggaaatgcaaatcaaaaccataatgagatacaccactttacatcgactaggatgtaaagtcatatcataaagatggataatgatgactgattgcaaggatgtggagaaactgtaaccctcacacactactggcggaaatgcaaaatggtttctccttttcagatagctcctcaaaaggagaaacgtaggagttcccatatgacccaccaattccatttccaggaatgtacacaagggaaataaaaaatatgtccacataaaaacttgcacacaaatattcacagcagaattattactaatcgttaaaaattgggggaaatcaccgaagatccaactgatatttatttagataaagtggtatatccatacaatgaagtattagccataaaaaggaaatcaagtattgatacatgctacagtacatttaatgggtatattctataatgtgtgaattttatctcaacaaaatatatttttaaaatatgggtgaaatcacgggtactttagcataaacaaaggcaatggcaccaaactactatacactagtctaatatgcatttcatccctaccatggattagtagcagttaaaaaaaaaaaacagccagtttcacttaagaatgaccttgataaagtcatacaaacagtgagtatgactgaatcatggcccctgagcacacatactttgtgtgacaagatgctattacacataaagcacttctcctatatacagaaatacaatgatcatctctagggaaaagcacttgtgtgattgtgcaagttttgggctagcccctttttcataggatgttgtttttatttcaagaaggaccaacacactatagttcttcggacttagttatttgtagtttttacttagttactagatttttttcaaaaatgaacaaagcaagcctgtctattcaaggaaagtaactaatagtcgttgctgccaatgacagaattcatgctttcaggcaaaaattagaatttcagaaaaccagtatctgccatcatgagttcgacagaaattctttgatgatgtacccttgttcattaccaaaggtgctaacaagaactcactgaaccattattttcaaatgaacaacataggatgctacaaaacagtgcatgggttaaaggtccattcaaagaaaaagacaaaccaatggatattaatgtaacagtatgaaaagttcactgatacaggtacaggttcccagagcaactgacctgtaggaaactaccagtagagcctactatcctatcaagtactgaaatcatctacaaagaccgtttcccatgtacatacatatttatccaaagctgattttcttcatatacatcaaccaaactatgtactgcaacactcaagagatgaatacagaagcaatcataatatggctgtatcctacttagtaagacattaacgggattaacaaaaaggtcaaataatgtaactcttaataagtttttggttttggactatgattatttttcattaaaaaatgctatatgtgtttaacacgtaactggtttgtgtcattttttaaatgaataaatatcttaaagtgtcttaacttttaattctaatatggtagatatgagaattaaagctgatattaataaatataatccacattaataaaagccttttggggtccctcaataacttctaaaagtagaaaggggtctggaattcaaaatgcctgaaaccctggggccagatcatctgttccattactccttacatgatgatttcaagaagcttgatgtgtcacataaaaactgacaggagtcacctgttcggtgataaatcacttggcagggcaaggccagttgctaagctgggactttcacagacacttgaagagtgtgactgtggttagtcagcagtatctttcttatctgaaaaaaacagatccttcattgcagtatccgtacctgaaaccagatgcacaactctttgattgtattttgaggtcacaaaacctactgctcaggaaaatactatggacagcaaagcggtgagtaccaggattataggaaaggggaaacggagacgagagggaggcaggtgaaattaacatagtgaaccataaactggctgccctgaagacttcagcaaggtactctactaaagaatattttgatgagatatctggaaatggaagagttttcaaacatacggaaattaaaaactgaatcaaattaactttcatttgcaaacaaagagaaggtttccaaccaaacccactttttgtaaccatcatgctgttttagagcagcgatatacccaaatggcaaacatagccagaaagtcaaatcatgtgttaaacgggaagtaaagggggcagggggaggactgggcaacaccgacagagccaaagacaaggtatattttgtactcaacagctcattaattttaagtgtcgtgggaacctgccagttttactcctccaagtaattatcttttgtcttaatttgtaagatttgagaaagggagagaagaggaaaggaaaaaaaatattcactctcacagggaaagattaaaccctgtgaacataagagagagaaagacagaaagttcaatgtatagaagtcctccacacactgtccccaattaaaagaaataattggactagtttctttaaggagagaaaaaaagcattcatcactgtgaaccatattaggaaattgtattgtactcagatacaaatagctttacattaacgaacagagacaaatatattgatttgtatacacatactctgaaagttaaacggcctatagaaaagtgttttcacaccacggcaggcaaaatctttaaatccaaaggctattattttgatttagggtcacctcatccctgagaaggtaagatttgctcccaatgagggatgaaaaagatatgggcaaaagaagttactttagaaacatatttaatagcaatcctgtaacaatttgaaaggcagagagatacactttcctaggggaattcacaactatacctccagggagcttgtcctaaacaatgttccccaaaagctttgttcgcatatttagatgctgacacaagtttcctggaagagaccctcaaggaaggcagccctatgagaaactgatcgcaaggtttttaataccctcactccatgcacagactcttgattttgatgtctagttctgctcaccaaccccgtttgggcctcaattccctgaactacagaccagctggctgcttcctcttatccgccctccaggacttgctgaagtattttgaataaagtatataagtgctttgcgttcttcagagaaaggagttgcgcaaatataagaagaatgatcttttcgaaagctcttgctgcaatggcaaagatccacatgtgaaaaatataatttttagagaaagctgacaaagctggccttctacttttacctgtctccaagcgcctcccagaaccagacgcccctatcttgccaattacccatgctaataaaggcacctcatccaaacacaagagggaatcctgatgtgtattattagattattagatgtgtatgaaacaggagtccttacttggcatccagcaaaagttataagatatcctggaattatgcagtgtatgacctgaaataatacagttcagaaggcctaacctccttgaaagagaaaaatccagacaaggaccattacagaaagtcagccgaaacatctgctagcaaggcaacaaaggaaaagaagaccctgaagatgggaccgaactaacccccaaattaaaataccttcttcctgtccacaccccaaaacaaacgaaaggggcaaaaaaaagaatcactgtaaataaagaagaaatgtgttaagcaagggaaaagagatccaccgcaagtttctgatctcaagccagatatttaaatgtacgcttcatgtcattacaaggcatcccttccttgggcaagacacagactccgtcaattggctggcattaaatccctgttactgtacaaaagccacacttgctccctggagccagttcaactttgagtcactattgtctgaaaacaatggaatgtctgccaacctgtgccaacagttcaaatggattttaatgtagcatgtgtgagtgctgtaacccggtttgccctgggccaaaacagctccaccatccacgtgtaaaactagggaaagctgcaagaacacagcttaggtgagcaaaacccccattatcaccttgcatccagccagcagctcactcgcacagggaacaaacgtcaacctgggatgctgcctctgtactccgaaactccagtatcataagcaaattctactggtttacaggctttgtaaaacgcttctggaactttcacacaatgaaatctctttcactttgatcacaattataacagatatctggaaatagaatgtttaaagccaatcacatcttcttccttttctatagaagaacttaaattctgtaatatttttcccaccaattaccacttggttgccactctcatcatgatctccaagtgtgaatgcattatgtgcaatgataaaataacagacttggatatatctgccctttacacaaatttcttacatatattcctgctaacatacgacactaaaattaaaagacttttatgagaatataaaggtcaggacaacagaaagaccataaatcaggatgaatggtttttgtcattgaaaaatggcttcttggccctcttggcccccaaaagtgctgaggaaaggatggcagacctgatgattactagccccgcggcctgtgtgggcatcagtcactctaaaatgtttgcgttaatggtaagggaggaacagctggacaaatggccttacggggcaacaggcagttggtctgcaaggctctcgtgctttatcactggcaagaatcaaggcaagagcacagaactgcaggttacactcagaaaaggatggcgttaactcgtaaagaacacacgaataaaatgtttctgcagttttgggtttcataaaaccctaaatccggccgggcacggtggctcacacctgtaatctcaacactttgggaagccgaggcaggcggatcacctgagctcgggagagcatcctggccaacacagtaaaaaccccatctctactaaaagtagaaaaattagccgggcatggtggcgggcacctgtaatcccagctactcaggaggctgaggcaggagaatcgcttgaacccgggaggtggagactgcagtgagccgagatcgcgccattgcactccagcctaggtgacaagagtgagactccatctcaaaacaaaacaaaaaacctaaattccaaaaataatgatttaaaacaggccaaccacatctgaagtcagtgataagagttctggctcacctttggatttgagtaaggaatttgtaaactgtttactacacaccgagagagaaacacccttaaatatgcacatgcgagttagaccagaacgcatcccattgacacaattgactatacaagttataggcaacttggtcattttcaaagtaaaaacattagcacgaaaaaactaaatacagtcggccctctctatctgtgggttctgcatccatacctgagagtagtgaccccaccctcacatatcctcccccacaaccccaagcagcattgcgagtcaggtattagtaatataattttacaaaggaggaaaactaaagcttaaagaggctaaataatctttttagccctgacaccaggctaaaaagagggatcagagccaggagcttctcttccaccaccagatacaccatcttctagctgcctgtcacagaaagagttacgaaggtaacaacaccaaactcatggggcatgggccaactatcccgaagtgtgtgcctatatcccccactaaggccctacgaggccagtggaacaaataaatactttagcaaagcaagaagaaacagggaaaggatgataatcctgacacaggaattaccaagaccttctaccacactgaaacagcccacaacatagttctggcgaggctgatgatgtcacaacactcaagggtaatggctgactctttgacagtcctcatcgtgccccaggcatttgagatacataaactttctcgagttttcctagcaattataaggttgttccaggcaccagatcttttcaatcacattatgttaatgataatatgcaacacagcagtttctaacattaactgttgtaacatgtatcaattcatttagttattgccaaaacctatgatctcttcttcagagataagaaaactaaaacagaaaaatcctaaggttgcagccataagtgtgtcagtgctgtaatcatgatgctctgaaccatcctacccaacggcctctaaggaacaccgccccaaatgcgtaaagggggtggttagaaacatacattgtataactggtctctctacatgtattacagctcttaaaaaaaaaaaaaaaaaaaaaccaacactcccatcccatattccaactttttggaatagtcacttgtctcaacaggaaaaatggagctaccagaggttaaaaagaggtaaagagaatatcacatgttctctcgggggcggggaggcggcatttgtctgttacagagtgtctgtccccactgaacatagcagggctatggcaagctcctgaccctgatgcatgaccgacaccccaacaccccaccgcccagacaaagagagggctcaatgcccctcaaaggcaaccacagagcagaaatgtgataaactcgtccaaatgattgctttttggcccttacacaacatgcccccggtatgaatctaaaagcaattaagtcattccagctgggagtccaatgacatgctgtttaaaaagtcttctgagaaacatccctcttcagaaaacgatatgcacaaaagaaacaacagccactcttcttccttccgtttttaagttataaaaagcatttaaaagatacacatgcagctgacctagcaacaagccttcaccaaggtctcctcctcaaagcactcaaaaagccaaggtaaactcattccaaaggcatttattaattcctctagtctacctcacttaccccctggaaaaaataaccaattatgagagcttaagaaaaatctaggcatctcaaatatcaacttgtaatataaatacccatgaagcagtgttctgattgtgttatttggtttccaaatagtcattacctaagggctccatttttagaatcatttgagattctgtatatggaagagtattttggaaactctgatgtgctattgaaatagaagttgctggaagcattgttattgtaacccttgagtgctaacccaaggttaaaagctcatgtgatgctgtccaaatcatttcagattatatattttaataaatccatttccattaggatgttcagtggattacaaatgagcacattagagtcctgtgtaatgtttgcaaaacaaaacatctgcctggggacagcaggctcttgcaggaaactactggcatcaggactcctgctcggaggaagaagggtacagtctcaggcccatgtggaagctgatggcaggacactgtggatggtgtgtgtgtcctctcctgccacctctgccatgaggccagaggtcccggctccatgaccagagccactctgctcttttgtggagaaacaagatgaaacaggacacccctggcagtctgggttctaggttcttcagctagctgctgaaataaagctgttctccttgaaatgtggcctaattaaaatattggccaaacccaccccagtggtaaagcatcagttttccatacttttgttttctgtgtgtttatctccccacatttcagcaggggtgatccctctggggaggatacagatgttgctagatttcctgacacgcctcaacagctcgagcatacaaaatagggaaaagcacaaatctgataagagaaataccctgtaatggaaaagtcacaaaacaaccagcttgctctcccctttcgcttgtgaaagattaacaattctgagcagttgcttgaatacacaatcgtgatgccctcacccaggttctccctgcaagaaaacctattttaagacctgtgccttcttcacccaagtcagaaaccaaaaggacacgaagatcatctgcctctatatttgaatgttttcaaaaaatgagggagtaaaactgaggtgtgaggagggaagactgagctctcaccttcttaactaactatatccaaaccgttctttccatgcagccagagaacttattttcatctaaaagcacagctcgtgttttgcttctattcaccaaggcactccaaaatcagggaacaggggtaagggcagagcatcacagcttcctgaggtcgcaggtgcagcacggcctggctcaggtgccttgtctcatggcacaatgtggggctagtgggtttatgttgaagaacaggtggtaggcgattatgcaagagaaaatgctagttgcacggcgaagcgaggacctgggcctccctggcagttccacagcacctgatgtggcctgagatgtggtgctctccaggactctttcctctgtctgcagttcagaagaggccttcttcaggttcagaaaattgctaacctcttttctgacagcacctgcacctgcagagctccaagcttcattagatttgcaaggcactggtgcctgattgcctttttattgcaaggaaccctctataggaagatctgtttcattttatattatgtcacatttaaataaatactccctttgatgactgatggatactcataatgaaatcccattataagaaatttctaggaattccgctctaaacttacagagaaatggacctcagtgaaattttgcaggaaagaacttttagctgccatgggaactgttgccaacatttgatctgtatttattacacatgaaaacaaagctctaggtgatcccagcagtctgaccacttggaggattcttgtgtaaacgactggtgtcaaccgggattattactgactttcagcaactcagcctttgcttggaggatgcaacagtacaccagttttcctaagggttataaaagaatgaagaaaacaaagtatagatagcaatgtaaatggggttgaagacacggtgggatataaaagttttaatctggacaagtcactattatctcagggaaagaagaatggattacagggacaaaattttagttgggaaccttcacccagctgaatagtgatcttggaaatgtcattttccttgaacatataacaatggctggcatccaccattagagatctgaatggctctactgctgcccatgatacagcctcattgtttccttatgctgggatataaatgaatcaatgactggacaaattaatgctaatctactctatcatgctgatttcacagaagtagaaattaagaatcagagaagctaagtaaataccttgcccaagaacacacaagctaacgagtagctaaaaaaaaaaaaaaaaaggcatgcaactaagttcctgatgactgttcgatggtggcaaagacattcctaagaaatgaacagacaaaaatgacaacaaatatgcatattgagcaacatggcattacagtgtaattttaatcatctagaaatggttgaggaagtagcaatgttgggcatgagaatattccacagctgagaatatttaattttgaaagactgctacacttaggtttttatcaattttggatgagatgatcaataatttccttctctactgttgaaaatagtaacttcagaaatactcttaggttcaattagcacctcttgcctgagggattactcccaatatcacaagtgtttcctttaataaactgacgtcagtttgtttccttgtcatctgccttgatataaaagcggatgtgaaatagactggggaaggcagcacagctagccagctactgagagctcagtgttcttctacagtactgcctgaacctgaggctgacattagctttcttcaaagctgactttggtttcacgaaaccaccatgttcccccgggtcatttgaaatcggaggagcattccaagtggcctgtatattactaagctggctttattccattccctccactggcgtcataaggaagcactgacatcctgtggattgttactctttggcttccaaggccattcaagccatgtggcaacagcaggaaggactctgcagagacctatatcccaggtagtggcttgtggggattttttcttttcatatgacttcacaaaagacttggtactcggatgcctacaaagggacaacaaatacataaaacccataaatatacacaaaaactacaaaatgtcttaatggagccccaacgatcacaccacccccctcttaaggaccttggtatatgggtgtgaggtgggtggcaggacacaaagcggggggggggggggggcacgcacatcagaagacaagggagacaagtcacccaggtagcatcaccaagtgacagggaatgacaaagatgaatgagacactgaaacctgtttcatcaggagaaacacacgtaaagacctgaatgtcttctgacgtttctgacagatgtgccaggagacatcatctcccattagctccttgtgggtagatcctattgccgtgttcatctgtgctatctttcagagcgcttacgtcagcacaggggcttacatttttctcatttatacagaagttaatcttatttgatttaggagagaaaaggtaactccataaatggttaatatcattcaccactgttaacatggcaaagattctatgattatgtttcagcacttatcacaataaaatgagtttgagctctctccaaatcctccacaaatacagcaatttcgggaacatgtaaatatgaaatctttcctaacacgggtattcacatttgctaaaaactcacaaattctgtaggaaaaattctagtggagttggtttcgtgcttgtctctttgacttgcacaggaaatggaatttttctgaccaggttaagatctaaaaaatgcccaggcatagcaatagaaagaaaacctcagactaaataagattcaaacttccctatgacgctgctgaagagcaatgaattaaattgcagagggacatgcccaggaagtgagtgcctgctcaggaacgggcaggcctaacacagactgaacagggaaatggctggtgactctggacaacagaatgggacagcaagaaggactgcagtctggacagatctaaatacaggtctcttgggcctgcaacaatccccccaccaaacttcccctgaagttcaggtgcaggcaaacagactgcacagccccatggcttctcccaagatggtagttctgggactctgctgggttgaaatcaaagaaaacccattcacaattcaaatacgacataatcaaaatggtagacacttggaggttgggggcaggcctaatcacagatgacatcaatctaattaaaattataagccagctgctcagggatgtgagaaaggcctttcagtttggttatctacaagtctcagaaaaggaagcacagaaaggtttgtacatttcagtgaagttagtccccttactaagctcagctggtttgggtatgcttcctgcagctcctctatctgatgctgtgactctattgtaaaagaaaggatgacagaagagacagggcggaagagggacagcaaggagggcaagggcacaactcagaaacagcagtaggaggtgggtgtgtcggtgcttacccaagaccactcattccacctagtcttcccagcctggagccaggattcacactatcctaccagcccctcaccgagagacatcaaaattcatgaggggacaaaaaaatcccaacactgttcctggaaatatctgaattaacaggcattaaatttttaattttaaaattaaaaaaatttttaaataaaattttaaattttaaacaataaaaaatgaaaaagtagaatctcctaagatttttgaaactcagaagttcatctgtgtaaatgcacagagatatgtatctatagatagttacactttccttgactcctagtggcaatgacagtggtcaatgtagaatcattatgccctcctttaggtgagagctcagcctatcccttcaccctcattccatccccttctttcatatgctccatgtaacatgctgccagatagtcactgcccctgcacatacctaagatccatgcagatgatgattcttaacattaaaaactgaatccatgagaaaaatcagcatgtgaatccaatgtctctaaatcaagctcaaacactctggaaaacaaaggagttagcaaccccagtacaactgcactagtatacatgggattaactcaactgatcaagacgtcagataaattcacctgcccaatcagcataaaagggtgaaaaacaacttatgaaaaggacccaatccgatactacactgatgaaacagatttctatcatacagccatgcagaagacaacagatgagggtaattccatgttttgttcatatttcttcactcttcaatctctattaaaccaaaaagaaacctagaaaattaaattccttcacaagaaaaagttctccagaggtttcctttctatccatattatatttcaaaaactttacttattcaggaggcttcaagcagcagctccaaaatgataaattcctggtgtattctcaataattcggttgtctctcaccatcaacacaaactcaaaagattataaagttattacctttccacaaatcaacccattcctaattcctattcaattaccttcacccccgcctctgcaggcccctgggaaaagctatgccactgtagcttctcaagttcaggttcacatcagctgttgcctggatggaactctctgaatacaataattttttcctttatttcagactagtctgctaccaaaggaatcgttcagaacttgacgcatttcctcttactcccacatctaaaatcatcaacaggttcctattctgttattagaattctttctcgtgcccaggtctttccaggtcaccaaacagtagacctccacactggtggaacaacaggcaacagtcccaaaaacaggcattattccgcatcgctctgtttgcgatgttcttcctccttagaaattacatccgtacactaatacctgcattccaattcacatatgcagctctcttccaaccacccagatgccctgatgaccacagctgcaggtaacaaccttttcccgaaaggttaaaatgtagttacattttgtatttaccccatctccccaattaaaccacaagaacctaaaaagagattgcaccctctactatgcagatgtgtcacctaaacacaatcaaaagcaagaggcaagccagatgaacaattattaagtggacagagcagaaatgcccaacaacaatgaaagctagacagagatttcaatcatgtctaagctatgcttgtcctgagcctctatttcccggtgaatccagaaaggcaaatggtagctcagtgcataggcaccaaggagaaaaatgagcagctctcctttgcctcaatcacttacagacagcactgattttccgccatttgtagacaaggcttctttatcttacagggtctcagtgggtcctaagtaaagtatgtctagtggagtagctgataggaggacaacagaaaacagccatatctcctgactcccattctctttgcttccctcctctttctttcctactttttttttttttttgagacagagtctcgctctgtcgcccaagctggagtgcagtggcacgatctctgctcactgcaacctccgcctcccgggttcacgccattctcctgcctcagcctctcgagtagctgggactacagcagcacaccaccatgcccggctaatttatgtatttttagtagagacggggtttcaccatgttggccaggatggtcttgatctcttgacctcgtgatctgcccacctcagcctcccaaagtcctgggattacaggtgtgagccacctcgcccagcctctttcctcttttcttactctcattcccccactcagtgcaattccaattggttcaggactacctctgtgctgcctctgaaatcactcctttttatacctattctacatcttccaatgtctactggacaaccttcggtcagggaattgcctacaattacaacctcgctgtgcatttccccttcaagttatttccctttaagaagtcctcatcatcgatgccggcttcatgttttcagggcacaactccatttaagtcacttctctattgaaaaaccactaggcggctgggcgtggtggctcatgtctgtaatacgtgggggcctgtagtcccagctactcaggaggatgaggcaggataatggcgtgaacccgggaggtagagctggcagtgagccgagatcgcgccactgcactccagcctgggcgacagagcgagactccgtcacaaaagaaagaaaggaaagaaaggaaaagcggagaagcggagagggggagagggggaaagggggagagggggagagggggagaaggggaggagagagagagagagagagagacaggagagagagagagagagacagagagagagagacagagacagagagacagagacagagagacagagagacagagagaaaagaccactaggcactttctatagccaacttatccacataagatgagtttctttgctgtgatactcaagctattgttcctgccttttatcctcctcctccacactatacacgcaaggggaaaatcagtccacttcagaatgtatgtgcaattccataggaggaatgataattttcttcctataccatatccacctgctaaaatcacattagtaattaaaggggggcacagatgttgtttcaccaaatcttcttgaccatccccatgtagatctggtcttttcctgttctgatgcctgtttatctacagctcttatagaatttaccatcatctccacatcatcagagtatctgcactcacctagaacaccctggactacactaagctacactaataatccctttgcccatgaagtgtctggccctggagaagtacccagaacgagctttgccttcatctcatctcttctcagcagaggctctcttccagctctcacccaaagctttagattttttcttatccaagttcaacggtggacctaccatgcccgttgtgaacatgtttgtgggtttttcctttcctgggggtcgactggcatgaagatgaagcattgttggtggctgttttgacgtcttctgtctcatcatcttcctcctcgacttcctcctcatcctgagagcttccaaaatacaccatgctgttgggcagcgcaggagaacctggtggaataagaaaaacagctcataaacacaggccttgaccctcaccctttccagaaggaacaccacaatgaaacaaaaccgaggagaaaaaacaaagcaactgatctctactgccattttaaatttatttttcaaatgctcccaagatcatctgtgccttttgaacgtatttcaagcaaaatcccccagcaggaagaagatgcaaaatagaacaaataaggatttttaaaatctcatctgaatatctcttgagaaaaaaaacaaacacctccaaggatggaacaaaaaaataataaaataaaaacacctacccactgctgaggaagagagattactctaaattaatagacttaaaaaaaaaaaaaaaaagacagagaagacagaagtaaaaacagaatataacatttcattatataaaatcactgtgttgtattcataaggaatattcattccttatggtggatatgaattccccaaattccaatagttttggaagttactttgatgtcctgattaggttaactggatgcaaaaatcacccaaataaattcccacgctgcactaagtaaaagtgctgaatttgaaataaaaaataaagaaataaacctcccaacgggggaaccgatctcctcacctttacccttttacatcttaacctctcatcctcaaaggttctcattccggattttaaagtaacaaaaaaataagctcaatatcattatttttctagaaagggtctcactctgttgcccaagctgagtgcagtggcgcgatcacagctcactgcaccctttactgggccaagcaatcctgtagctggagctacaggtgcgcaccaccacacccagctaattttttgtggggagatggagtcttgctatgttgcccaggttggtctgaaatttctggactcaagcaatcctcctgccttggcctcccaaagtgctgggactgcaggcatgagcccccatgcccacccttaggctcaatattcttaaaaaaaaaaaaaaaagcacaatatagttcctctttatcaaacaaaggcaattcaggaaatacaatcaagtcatttgtacgttgtttggaaccagaggcttctaaaacacaaacaaaatccccttcagtctaatagtaaaagaactagtaaatacaaaattcatgtcttctcttgcctgcctatgaatgagctaaaaacactccagtaacatcaccgaagagatagatcaccaattcactctcctacctaaatagagatctcaaagatctcaaggtttaaacacacagttaaaaccatttctgtccagcttcggaactatatatgctcagtgacaaggaaatggaaaatgagcagtatcaggagctgagatggcaaaccaagcacccatctccccaaaatgcaaagactatgtgggaccttcaaccccttccttttcctacaggcatcttcatgacctatcaatgttcaaaaaccccccaaattatgtgaaccacattactgagtggatatgcaactgcaaagggatacagtcggcaaaaagaccctctgtagacagaagatttcaacttggtcttacaaaagccattttgatgttttgttcccctccccttgattgtctccatttagaagtagattctggacagaaagaaggttcttaaacctgacacagactttggggaaaatcaaatagaagagggagtaaaataaacagtcaggagttaaaagagaaagagaaaaaaatatctatccacatttccactggaccaaaatatatactcaatctaaatggttttacaattggtacaagactgacaaggaaaacaggaggctaattagcatagttttcagtacagtatcaccattcatgggtacagacaggttatctaatcaaatacaacaatgttgttgatccctcttccctaaatctacctttataagtatttatgaaaaaacaagagtaactacagcactcaaaaaatattcaaattattttactatcgatctaacacatgctgtcagtcataccattaggagagaacttgtaagttttagactctgccattaaatttccctcttctaaaaggagatgggataggttaaatagttcctcccagataaaaatatccatgcttaatttcttttaaagaacaaccttcctatactgtatcttggaggcaatgactagcagctgaaatccaaacgatggattggtataaaaacagcaggttcttgtgtagatctttctaatagaaacttctgcagccaattcaaccatttttcagaaggaaacaggagaagcaggagggaaagctgttacaggcatgtatttcaagaggagggccatcacccctccagccttcctctctcccctctgttgcaaaggaaataaactccacaaatgaggccatgtgagagcaatataaaaatacagcaataaggctgggcgtggtggctcacgcctgtaatcccagcactttgggaagccaaggcgggtggtgcacctgaggtcaggagttcgagaccagcctggccaatatggtgaaaccccgtctctactaaaaatacaaaaactagctgggcatggtgatgcatgtctgtaatcccagctactcgggaggctgagacaggagaatcacttgaacccgggaggcgaaggttgcagtgagccgagatcatgccactgcactccaggctgggcgacagaacaagactccgtctcaaaaaaacaaacaaacaaacaaacaaacaaacagcaacaaaaaaaatacagcagtaagatccaataaaaatattctaagattcaaagagaatcaggtaaaaatccatgtgaagcacattagaaataaggaattaacttccacttaacaggatctgttgaggatttttttaaaaactcaaacattagagaagcagcatgaagcaaatatcacattccttgcactcaagatgttgagagaaagggtgaggattgagtttatgttagggtgaggattgagtttatgttgcaaagaactaaaatggagaaaatatctagacgctcagttcagcatccagactttgttgatatctacaaaggataagatattgtttgagacaagaaatcactctgtcgcccaggctggaatgcagtggtgtgatcatgactcactacagcctcgacctcctggccacaagtgatcctcccacctcagcctcctgtagctgggactacaggtgcacaccaccaaacccagataattttttcattttttgtaggaacgggatctcgctacattgccgaggcttgtctcaaactcctgacctcaagtgatcttcccacctgatctcccatagcactgggattacaggagtgagccaccatgcccggcccatagacgataattttttaacaaaagcagaaaacaaccaacattatgaatggatttgttttaatggctcctcggcaaatacgaatatgtgatgtgacctgctgggtgctgggaaagaaagtgaggggctaaaatggaagaaagattagaaatagaagaccagtgaggaataagggcaattctgaggaacttgctctcaaagtaaaaccttataatagtagtaagtccctctgatggaactggccctgaagtcagaggtaagaaagaacacaatttcttctacatatggggacacaggaaaaaaggattgttttcaacctagaagatgattctgcttctattcaggtaattggcatgttggtctggatctaaaggtaaagaatcaacaaagaaaaatgggtaatgaaggattcgtaaatcagatggggaatcaggaggtaatatgttgaatggaaggaagactgggaaaagggaaagtgtaggaaagggattgaagcagaataaaaatgaactccaggggaggaggtcagttaaccaccaccagagtacccttagttcagaggttaagcttgtaccccttcttctcactggggggtaccccacaaggacaacactgtctccccaagcctggatatggcctgactgtcctccttggcatcatcctccaagggccacggccaatccatcacccatccaccagggggagcactcatgaacaactggcatctcccctagaaggaacagacctccagaatttggtcgggcaccctcatacctgtccatctcatcaacgtcatagacaaacagaagtaggtacaaaagaataaagccaacagagtctaacgctgcacatgccattgctctgtcaccacgtggttgctgtaaatccctctaagaattctgctggaatgtccacttgtaaaatcacagaggggtcaaactggcattccagacccagagaagccacagaattggtaaaaatgaagccaaagtaggttctttttttctcctcgagacaaatgcagtaagatcatctcttatttcatgccaaagtaaaaatggtcacagcgatagaaaaggactaatatctagaaaatagctaaataacaacctcaaatgcataagacacaaagcatctaagaaactaaaattaattaagacatttatataaagagcatttatttcctctttacctacataccagcttgattatctcatttagaaataaatgcagaggaggaagaatctgctcaatacaaacaggatgaaagaaaggatatttcaaacccctcaagtcagatagcagcccagggtgtttatcactggagaaaactattgcatatttctcagtatgaaatgggtgaatggatgcattacgtaattatattgtgctgagtcggtagaaacttcgtatctagcagacgtatttgaaaacagaacaggctgggcagggtggctcacacctgtaatcccagcactttgggaggtcaaggcagaaggatcacctgaggtcaggagttcgagactagccaggcccacgtggcgaaactccatctctactaaaaaatataaaaattagctgggcatggtgacagatgcctgtaatcccagctactagggaggctgaagcaggagaatcacttgaacccagcaggcagaggttgcaatgagctgaaactgtgccattgccctccagcttgggcaacaagagggcaactccacctcggaaaaaaaaaaaaaaaaaaaaggaaagggctccacaaccccacatgaccttgcgttctcaggggtggactctgcatggcaaaaacacaagctctgttcacattatttagcaagtgagagaggctgactcctcacatggaacaccacatcatatcactcctttacaaactctcattttagaaaagtaaccaacaaaagctgtatgttttagaggtttgggaattgtgtgggatttttttcagggggagcaggggaagactttatgggtggtcattataaaagtatagtcaatatagacagtttcctattaaaattacaggcagattttctctcccgattattcaagtgcattagcaaatgtaaaaaaaatctgaacttggatcagataagagcaatcagagtacggaatgcatctgctctttgccaaagccgtatttcattacttttcagaattagctggcaatgtctccacaatatttactgaagtgcaaaccaaatgttttcatctggacaaaaatcaaactgtggtatgttacaacaacaacagagatcattttaatccaaaagcttgctttctctaatttaggctgtggtttctataaaattggattcttctctatgaatcatgtacacagacaagccctcctgcccattatcttccctccctcgatcagttcttgatcttaagcagcgaaacatcgcttggctgtattttggaaagaccctagagggattccctgtgcactgtcatttagctgcagagtcaaattctattgcttgacccaattaccatggggctggcccactgagtttgtgtttcatcttcgggatacataaacagaatgaaaagtaatcaaccccgactatcaaattaagaaacaaaacttcaaagtgagctggcagggacttgggcaacggatagaagatgaaagaagtcacagaagaaagcagttgcacccaaataccctagtgcatcaatctacgtatgtatgtatcagcactgttcaaagcaccagagactcaaacagggcagctgtctacattcatctcacatgttcatgcatgcacaacatgtaaacacaaacttccctaaaagactttgggacaaatataacatgtccagtgccaatctctgcccattcctggtctgactttacaacttattagggaagaaattaaaacagaatttcccaattcgcattcatttgcctaccatcctaaaagtatttgccagatccagatgctccatgtgctattattatctgtaaggtgacttgcattcatgtcttaaataatttatctccattgtatcaagacaaaattactatcaattgccctaaaggaaaggtaatggttaaaattaaaatgaatgtaaaacgttcacttaatgtcctttctggtatgaagagggatttgtgtagcagagatagggaagcagccctcaatagcatgagcaaaacacaaagggaatccctattccttactgaatacggaggtgcctatccaatcatgctcatcttgggaatgtacttctttttaaataggtatttccaaaaaaaaaaaaagataccatcactgaagggactctacatgggatccaagactccaggatgaggccatggctctgggagatgcttacttgccatgagactcgaggttactcaactgtatacagagcataatgtcttcagtcgaaacatttttatggctccaaacataggcaaaagcaagctgagtgactcacagtaaggtgatattattatgctcataggtataaaatcatactgtcattctttccataggtgacagcatatcttctttcccaaataggaaagtaactagattggttggtgaccagaatctgggagacaggggatgaaaatgcaaaatgaactcaatggttagaataagctgaacctttggtctttgttaaggaacaaggagggatgacgcaatgacctcctagatgcatggccagtctttccttcagcaaccctccctcctcctcctggattacagctctcaagaactagtgcaaacaagcacccaggtgtgcctatctaatcccacaaataggaaattcccgacattagggtagtattctatctgcaagtgcaattaacatgtgggacttcacaaggagaatacaatggttatcataccaccttccctcccaatctcctattcccacgctaatctagcatctttgtcattgaaaactgtaacgttccccttacaacccttcctatattgttgtctgcactggcaatttaaaacacattcaaatacacacccagtcaaatgccacaaggtctatctatggttcgcttcatctcactgaatatagaaatcataccacatagcagcagccatgatggtgctcaagccatcacggtattatctcaagtggagaagaagaaaccagtaagaaagtgaacattctggctgggtgcagtggctcacgcctgtaatcccagcactttgggaggccaaggtgggcagataccctgaggtcaggagttcaagaccagtctggtcaacatggtgaaaccccgtctctactaaaaatacaaaaattagctgggtgtggtggggcacgtctgtattcccaactactcaggatgctgagacaggagaataccttgaacatgggaggcggaggttgcagtgagccgagatcacgccactgcactccagcctgggtgacacagggtgggagacttcgtctcaaaaaacaaaacaacaacaacaacaacaacaacaacaaaatgagcattctaacagccactacagacaacagtctttgtgcgaatcatgtgaggccttcctcagttcccaatggagaagctgaatactcaacttccctgcgggacacagacaccagggactttagtgctataaatgaaaccccttcagtcagcaaggtgcttggccaacaaaacagcactgccatacttaaagtcttatttccatgttctctaagtggatttcagaaagactcaaggactctctagaaagtaaggagaaggccagagatgactctgagaagtactactgaatctgtgccagtactcactggcagcaaaaaggaagcctgccttatcttcagggagggcacaacatggtcagaggccagctggcctgtagcagggagaatcctcacagcaaaatgacctacagtcttattaataacatctgatcaacgtcacagggccaataaaagtgatccatccttcccctcctcagacctcaaaaatttcagggtttcagatttcttcattattaactgataaactatcccaacaaatgaaacaggtaactgactctaggagaaaaccaagcatatgcagaacgttaaggccactgaaagcccctaggcagtgatgacaccgttctcaaacatacactttcactactgctgctctcaaaaactaagatgcaacaactcccagagaccctcaaaaaaagttgtgtaccactggagacagtgtgatttcctccccaaagagtttacataatgtaaagtattcccattttgctcaaggaagctcattattagcaccatagtgttccttgcaattgggggattacttaattgctttctggcaggttaatcccctttcattctgtgacctctaaatcaccccaggcttttgcatttgccctacttagaaatcctagtcctcaatactcaaggctaggaccacatcaaaatatgtgttccttgccaatgaggccagcaacgctctttagaaaaaacaccacaggttggctgtctcttctattacctgtggccgattcagctggtcttttagacagttccacctaaatccaaaatctaataatcttcctctccactacctctgcctcaattcactggaaaaaatggtaaataaatgtacagttggacctctgtatcagacacttctgcacccatggaatcaaccaactgtcgatcaaaaacattcaggtaaaaaaagggacggttgcatctctactgaacacatacagactctttttttccttgtaattattctctaaacaatattatctaacaaatttacacagcatttacattgtattaggtattataagtaatcaagagatgatttaaagtatacaggaggatgtgcatacatgcaaataccatgtgccatgttacataatggacttgagtatccatgaattttggtatcaaaaggaggtccataaatcagtcctctgagttatcaaaggatgcctatatgtggatgatcgcctcaggtatcaattctgggctatttcatacccattagctctgcaacaactatgtgctatagactctagaatatccatttcgcagatgaggaagctcaggctgagaaatatttaaatcatctgcccaagacatgccagccttctgccaatgcccctagaaagaactccctgcagcctcaatcgattttctgcagagctgccagtaacatcttcctaacctcataggtgtattatgatgtcacccctgacttgaagaacgccaagggatactccagtaactagcccagggcatgcagaatctgaggcttatcctaactttcttgctttaactccaggacctccaacatcaatccatgccttggcagttgcttctgcagaaccccttcccagcactatcctctttctgcaaagattcctaatgcactgtaacgcggagacccgcagcaaatgtcagcattcctttgcagccatcccagggcctctcccttcctgctttaatgggtacacacttctatcccagcattttcacgcatttattgttatatcctcaatttcacccaccaccaatactgctttcctgtgtctaatctgttttctaggtgtctagcatacaaaaagagtttaataaaggtttgctgaattaattagcaactgaatgacagctgatcactaaagattctgtaagacagaagaaacaaaaggcaggcagttccaaaacaagacagcattgcttcacaacggctgacagtaaggatatttacgaggaactccccataataacactctcttcactgtgccgagccgtgacgctgaactgtgatgcccacggtcataggaatgaactgtgtatgtaggtttgcatgcttcaggagtcccctttgggaatccccttgtttgcagtgccccgtaaagaggaaaatgtaaataagagaatcatttaacctgccagtgctctgctacattaagctctttttaatctgttaataatcatagtcagaacaaagaggagacgacagaactcattaagaataaccagagtggtgacagggaatacggcgatggtacgaatcactgcatgcagcaagcgcaaaaccctcttccccgcgtgtgccagtgaaagatactaattatgcctctggcaagagacatgtggaccccttcaaagcagctatttaaagataaatacactgcgggcaaatacctcgggccggctgcactattcatcccatcctcctttcctgtagaaattttaggtcacaatattaaataggaaatgaaagagccttgcagacttagctggtagtgtcttaaaacaaatttgttttagatttctaaagcttttaacctcagaatgactagctgggtgtttacatatctatactaatcccagtattaatagtatagggtttttcctccccatctcaaagatttctcactgtcattaacagataacaaacaaggtttaaagaactccactcgctgtctttcccttggcctcacgatttattctcttccaaatcccaaagaagtgccgagaatattaaaggtaataattgaggactggagaagggaaaaaaaaaaaaaaaaaagacctggatccttagcaacaaacatcacttccaggtgtttgatttgcttccttcattatttctgcagccagactttcttccctataaataatgagcatattaaagactgccttctttacccctcacagtgctcgctgtcacccaagggtgatgggctgactgagctctttatggtgaacactagaggcttggggatgtgacaagctatgtttgctttggaatcagcacgaaaaaagaacagaattaggatgcaggtgtaagaaggttaatcgcattcccaactgtcaactttgcctgaaagggcttcaacaaggtgaagatttaactaaggatatgcgtcattagcagtggatatcaaaaaggtggaaatctctctaaatgtgcatcaggaattagataaattatgagacattcaccaaatggaacataagctattaaaatgaaatgacaggcatttttgtgacagtgttaagtaggaaaatcagactgcaaaaacgaaagtataatgcaatatcatttcaggaaaaatatgtattatacatgcacacagaatgctcagtaaaatagtcacaaacaaggtaattaacagcggtcgtctctgggagatggtggagatgctattttgaatgcattcttttgcctacttctttacctttcttctgccaatattcccaagatgaacaggaactacttttatgattgtaaaaaaaaaaaaaaaaaaaagcttaacatcctgtttttcttaaattaaaatggaaataaaattattaaagtaccacaacaacagggatcactatgtaacctttgtacacactgaaatacaggttttaattagctcaagaaactacctatcttgatgctatctagatatcctagatagaaaagatgctatctaaggccaccaaatccatcagattttcagggtcatgaagctataataagcatcatctgtcatttggggtttgtagagtcagatcaggtaaacacacttatcctcccgggaaaaaaaaatggtattttaaagctaggatgactcatttttaatacctcagatctaaaaaaagtataaaagaaatagcaaaacagtacaatattgtatacgaacagaaaaacaaataacaaagcctatttttattgcctagctcatatatgaaattcatttccaaaggttcagagcatttttttaaatttgttttaaacatctcctaggctttaattatttaagccttttttgtatttgacatctaaaagaagtaaattttatctatgaaaagatgattctcttctgtctggaatcctgaaacttcaaagccaggtacttacttggtaatgttttctctagatggcatttatttgaacaataaataagcatgcctccgcaactaaaagactctccaggtttcccagaacctcagaaaatataatgttataagatagtgcacgcacaagtacatgtagcacaaacacacatattcctctctacacagaatcactgagacattccctgatgggtttctctccttctctacctttgagaactaaacacaacagtcacaattgcgccatagtaaagacctgcataactaaattccataatcaacagagcaatcttcagacatcctaatgaaacgggattggtggactggtggaggcagaaactattatttcattatttactaagcaaaatgccgacagcaattttagacatcaaaattcctttcccaaaagtagccaaactagttaagtcatagttactctttaaagaacctggcttcgccgggcatggtgactcatgcctgtaatcccagcactttgggaggccgaggcaggcagatcacctgaggtcaggagttcgagatcagcctaacatggtgaaaccccgtctctactaaaaatacaaaaattagccaggcgtagtggtgggcgcctgtaatcccagctactcgggaggctgaggcaggagaatcacttgaactcaggatgcagaggttgcagtgagccaagatcgcgctgttgcactccagcctgggcgacagagtgagactctgtctcaaaaaacacacctggctccaattacgtttaaaagccatgcatatttagaaaaggataccaaattatggttagataggaggaataagttctagtgttatatcccactgtaggatgcctacagttagcaacacccagaaggaggatgttgaatgttcccaacactaagaaattataaatgtttgagatgagatatgctgattaccctcatctgatcacttacatgtatcacaaaatcatcatgtgacccataaatatgtacaattattatttgtcatttaaaaaaaaaaattttaagccacgcaagaccaaagtcacaaattaagagtcccatatcaccattgttttttttttttttttgagacaaagtgccacttaattgccaaggcagcagtgctgaggcacaatcatgtctcactgcagcctcaaactccaggtgtcaaggattccaccgtgtcagcctccacagagatggactatagacggcacaaccaagcgcggctagatatacctgaatcacattgctgctgatccttcaaagattcctttagggcaaatacatccttctgagtacacatcccactcgttctccattcctgatcatcacaccacactctaccagcctcacagtctagtggccatgttcttctctctatatacagccaatccagcacaagattctgtcatatttagttctcacagcttcctttccatcttcatactcaacatgcaagatcaggagaatctttcagccaaaatctatgtaaaaactaaggcatgttggctcatgcctgtcatcccagcactttgggaggccaagatggcatgagaattgcatgagcccaggacttcaagaccagcctggggaacacagcaagactccttctctaccaaaaaaaaaaaaaaaaattgctgggtgtggttgcctgcgcctgtaggtctagctattggagaggttgaggcagaaggatggcttgagcccaggaggtcgaggctgcttagagccatgactgtgccactgcactccagaagtggacaacttcttattttgatatgagacaagaccctgtctccaaaaacaaacaaaaaagctaatggagataaactggtgggaaccccacctacctcgtatctccctgttttcaaggctcaacaaccgacaagggctacaaaatttctaacaaatacattaataactctcctttcttatgtgttaagaatcaccaagaactatcctataatgtcaaaatttcccccccaacaattcagtcccaaagccaattagtaaggcagggcaattgggcaaggagagggggtgaggagcaaccatatggggtgtcagggctgagtttcccatcgtgggggcagcagagaagcagagatgggaggtggattacactgaaaagacagagcaagtaagtatattaaggattacaggagccaagttcctcagggatgaatgcacatgaacctcccttagtgttaaattgaaattggaggtatggctgctaactcacggattttaatatacacagaacttcggatagacccttataaacatgcaacctcagtctactaagagcacctgggagaaatgacattcccatagttcccagcatccctagtgcccagatcttggctcctcaacagcacttatccctataagaaagcagtgctccttgaagacatggccaattccaggactgagggcgggaaagtacaccatgagcctggaacattttgttgtgccagaagcaaggctggaaggatgacagggacatgtcaaatggaataaaaagccagcctgatgaggatccacggatgaggcggtgatctgggacaatctgaacatcagaatacataataggagtaacagattataaccctttgaataaaataggaagcccatacgcatacaattatgataaagatgatgagaagtatgtactagtttcaaagaatatcctctcttaacacttatacactgcaaaggctgagacgggcaactttactcctaacaggcccaccacagtcgaatgatcagcatgaacacgagtgtggaaagggaaggactgaactgtgtatccccacagaggacccaacaacaaggaggaggaatcacttcccttgtggcattcctgccaagaacacaaaccagaatgtaatcatgaggaaacaccaggcacccaaattaagggacattctaaaaaataattgacctgtaattttcaagtgttgaggtcaaagacaaacaatgaggaactcttccagattaagcagactacagacaattaatggcatcgcctaattctgaactgggtccttttgctctaaacttggacattacaaagcaccttcagaacaaatgtgaaacagaggtttgaggactgcatgggggccacgtatcactgtgaacttcttaactttgacagttataggaaaatgtacttatttgaaggaaagacacactaatgtattgagtgagggatgatgggtggaaactttttaaggttaacttaaaatctgtctgtaataataaattatcaaaatatttatcaaataaaagtgactatgaacctcaaggttttcccacagatgtccaatagcaaaggccctctccttctgctcattttctctcaaataacctcacccaaggaactctctgcattcaggacttcctaaattttctatcattcctccagaaatgactccttattctctcaatcttctgtgttctttcctcacagctattagaaaacttagtaataaggaaactgcaacaaacactttcacaaataactctattcagcagatcccaaatccacctggcctccgttaactggtccgagttgaaacatggaccagtatttgcactgtcaattagactctgaaagtaccagtactgttttccttaacgtaatatagggctgagagaaccgtaagtccctcatcaccatggcttattgacaggccttaggaagcacaaagaaaggggccttcacagccccaaagtcctgcatcaaaaaaaaactgccttacaaaacaagtcagcaatgtgtgtgtgtcaaggtggtggtatggtgcagagaaatcaaattagaagtcaaagttagaaactgcataattgtgcattgagaagccaggaagtagggtgttaagagtcatattaaaaaggaaataaaacttaactgatggttcaaaagccacacccagcacacactctctcggtgggatttctcactttcaattccccctcaacccaggttggggacagaaaaatgaacatggcagagagtaaagctaaggttactccacgtagacctcaggcttacatgtagattccacgtagacctccgccgatggttgcaaagtcttacctcgaaggcagagaaaggtaagaaaatcttctgtcttaggcttccttttagagaggtctgatatctgagtagctggagggggtagcaatggctccactatctttactggagttgtgctgggactattcggctgagactgagcaaacttcctttgtgcttgcagcctgggcctgcaaaagcaaaagaaaattaaaaataaattaagcagagactggaggatataggcctacgtgcggcaataaaatcatgacacataaggggaaaaaagatcctatttcaagcaaactcttcctaattaaggttctatatctctcacactctcataaaccacaggcctactttcaagcgcaataaatttggttaaaggactatgttttgtacatggatataaaatgtgtgtcatggacatgtgtatacatgtgtgtagaaatacatgcctatgtacacactatgtttgcctgagtatttaaaaactacacacggtatctgacatcatcagcttaatggtgttcatttatttccactgacagtaaagaagaaaacactacattatcctgctgtatttatatacatcctatacgtccatctaacggggtcacaaatccatacccacatctcttctgtgtcattacatccaggtcacctttgcctatttagccatcagtgtccctgtcgccacttctaaattcggccacgaaaagttcactacaacaattcaagtttgtactacagaaaaaaaggtatgtctctagtctatctacgccccctccaatcccaaattctgggttaccctctgccaacaaggtcaaattgcaactatttggtagacattaaaacagaaaatagccctaatctactcttcaggcttctttcccattacaatcctatgctaactccctaacttaccatttgttaactacagagtacatttcaattcctttcacctgaatatcttacgtagaaattcctttctatcaaaacaaatcctaatagatcttggaacagtgttttgtttgtttctttgtttgtttgtttgagatggagtcttgctgtgttgccacctcagctcactgcaacctccacctcccaggttcaagcgattctcctacctcagcctcctgagtagctgggattacaggcgtgcaccaccacgcccagctaattttggtattttttgtagaggtgaggtttcactatgttggccaggctagtcttgaactcctgacctcaggtgatccacccgccttagcctccccagtcttgaccttccaaagtgttgggattacaggcgtgagccaccacacccagcccagtttgttcttttttaacacagtagccaataagaaatttccctttctctccaccaataaatacacgaacatatttttgctttacatacaatcaacttgatatgtatcgtcaattgcctaatagtccctcctcctctaatcgtaaaggtctccactcacgcaatagtgagcacttgcaaggatgagaaactgggccctactttaaactgttcacctagacctgctcagagaggtatttgaaaaacattctttgagggcaggaaaacaacaacaaaaagaaccaagaaacagccacacagtacagggattgaaatagacctcatcagaatcccaaacactacgtaggatggataatgcaatgccactcaagacaattaactaataaaactaaataagtgccgggcgcagtggttcatccctgtaatcctagcactttgggaggccgatgtgggtggatcatctgaggtcaggagttccagaccagcctggccaaggtggtgaaaccccgtctctactaaaaatacaaaaattagcctggtgtggtgacacgtgcctgtaatcccagctactcaggaggctgaggcaggagaatcgctggaacccgggaggtgaagattgcagtgagccaagatcacgccactgcactccagcctgggcaacaagagcgaaactccgtctcaaaaataataacgaataaaaaaaactaagtaagtaaaagagagcagatgtattcccttaaagacatggttgggagtggattatataaaatagtaagcatttatcttaaactgttgatgctcaaaatgctgtaacatttaaaaaaaaattatactatttaacaaattcctacaagaaaatacacaatgattgcctacttcatcaaaactaatacctttaaatttaacctcataaatcctccacactcccgaaatataaagtactacaatgttatgaggaatttccaatctcattttaaccttaaattcccttgtatgtcctaagcagtgtctactcttgtctcccctatgaccatcgaaaacaccaccgtctaataatattcctgatacaaactgacaatccaccaaaacggacaaagtgtgactccaactacttagtgggtaatctatagtccttaaaaaaaatctacaaacaatgtaggtcattcagagcactttttttttttatttttaacctttttactgaaactgggtctcactgcacccaggctggagtgcagtgacgctatcatagctcactacagcctcaaattcctgggctcaggagatcttcccacctcagccttgctaaatgctgggactactggtatgtgccaccacacccagctgtttttggcttgttgctgttgctgggtttttttttttgataaagacagggtctccccatgttgcccaggctggtcttgaactcctggcctcaagcctatctcctgccttggcctcccaaagtgttgggattacatgcatgagccatgatgcctgtcccaaaaagcactttagaacccaggaataactgatatgaaacagtcacattaacaaggcaacagcaggaagtgaatcaagtttaacagaaattccctagtgttattttttaaaaaataagggggagggtgggatcaggcaatgccactatctctatgtcatggggaacaaagagagcttttttgcaaccaactgcctgcctctatataagtcatgacagaccagaagcccagaggcaggatcttcacatgggacaatgaagtggggggcagttagggtgacggggatattccgacaatcacagagcttcatctatcacagatgaggagcagttttctgcttggttgtttttccccttttaaattttccatctgttacaaatgtctttttttttttaattacataaaaaaatagaacaagggggcaaaaagcaatttaaaaagacaaaacacaagcctaatttattgggactcaacagacacaaaatcattccatcaaactgcagaggtttctcaaggctggctctcaatttctgtatcaattcacaggcacctggtgatggccaggtctcgagcacacagtgtcagaggagggaaggctacagaacccttggtccacattccaaccagctgccaggtagactgacccaacacaactgccctgcttttcccatgaggctttccttcccaccaacctcccagactgttttaaaacaaaggaaatgttgtgccatatttagaaaaattgctggtttttaattctactgaaaagtatttttaattggcaattacataatatatacatcttcatttgaatggacgcaaatcgcactctgagtattgcaggaattttatagaaatattgcctgcatgttaacaggatgttaagggtttacagcttttttagaagtcagggaaaacaaaccctatacacgatgagaagattgtgcagcgacaatgagaaacaaacaagtaaacacagacgaagcacagacaacggagcgagacactgtgagatattttacaatttcaggacctcaaagataaactgctcctaccaatgctcaaataaaaggtgcttggtgcctaatgactttcccagtgaggctatgaaaaataaggcaataacacattaaaaagtggcagtaaaataaattaccccttagaggaagaagccaagctcccaagtgattaaacatttgtgagacccagatgaaaccaggaactaaagaacaagacaaaccaatatcttttataaagaggccagaagaacctgtattgtctaaaaagggtaggtctgcagtgtggcttttcaacctgcagagtcccgtggggattaagagccccatacaaccaaagagcttgaatggcacagccaaatcctgagtaagccctctaaacagtacagacaggcttcagggacaggagtttccttctagaatgctggatataggaaaatggaagaaagtgatttggatgtgctgaaaactcacaatatttgcacctagagatgctaatggcaggagcagcagaagcctggggtaaaggaggaggtcacctggcaagcacgaggagaaaggtgaggctgcacccagcctgtggggcctcagccctccaggggaggcggcatacccgcccaccacaccatttatttcctcactccctgccatcagctgactggcattttcaacagaatactacctgccattccattattacagcaaaaatgaaaagaactgggataaaagaggttcagaatcactgtggggttggggtggagagagcacggggttcctggggttgaagaggtaaaaacataaatgtttgagagaaaaataaaatacgtgccctcccaagccttgggccttgcatgtagtcaggatgggccttcctgccctgggtaacacagccccagagaaggtgtgtgtccttcacacgcaccacggaagtagcaatcatggtgtaatttactttcatgtgttttttttattaattcttcaaggagatcccttacagaagacaccttcattccaggaactccacatgtaccctttatgtcaatgaaaccaattaaatcaagccctccagcaagccaaggtgaaaagatcaaatcaagtaaatgtaaaccagcagaggaagaagtatgttgatatattcagaggataacattttatttacaatatggtacaacatagggttggcgcagtgggggtgagggaatagatgtttcagatcagatcatcactggggcgtgtatgtgaattaaaagactacaaagttcaaataagttcagaagaagacggatacgagctgctgtttggggaaataagaaaggctggtcactttgttatgttcaaggatcttaataagatccccttcactgtacacatgagtaactaggagaagggtgagacccaccctgggtcacatagcttggatggcaaaacaaataggagcagcagacgaacctatgggtccctatgtgagagctgtctctgtcatgccacgccacctccacgtggcaggttaggcaaagccttgtgagcacagccttctggtgtgcactccctcactaaaacctgccaggccaaggagctccatggtccctcattcataaccaaaatcagccccgctgagtgaacaccatttaagctgtctcaaaataaaaggtgttaaaatgaatgaccatttacggatttgatcccatagagtatatgggagtgtatgggagtgtatgggatcccatagagtgtattttatgtggcaacaaatggcctaagacaaaggtagggattgcaggaatggtccaaggggatcttgcttactccaaacagctccttccatctggaatactctttctcttgccatgcctggcggcttctcatcctctaggccagataagagaagcaaacaatccaggcctgttactctgtaatagaggccacttcccgcacagaagcctctgcacagaagtcacctcctcggagagaggtgaccatcctaaagcagtacctcatgcataaccagccacctaaccccaaagccattgctctgcccttctgttggtatacacaagactctctactgcagtctcctctttctggtccacttctatatacaggccttaccaagtctagaggacaaggcctccatagatgctggaaaggaggaggggaggaacactatactgctatagttgctgagaattatacaacccatcactcatgatttaggaatcacagaatacagtacacacatggtatctgagcagaggggcagactgaatggcaactcagaggaaaagggagattggtgcatgtttgtgaaacagatccaatagcaacaggagaggaggagccttggtattgttgtgctccaggtaaagttagtagccatcccagcagaagtctacctgaaggtagacaggaattcagtttcgttaagaataaaactgtgtcttgaatatagaggctgatatttgaaaacgaaaacaaaaaaataccaactaggcaccagcctacatggccctcccttaagaatttaccatgccacttgcccattctcaccatcatctcgcagaagccaaataaggtctgcctccggctgacagtcaccctgtggcacaaggcgcttttctaacccttggcatttcattgtattccacatggcctcacacagcacaactgttcccaggccacagtcgctgggcccaagaggcggctcctgacacacctcatgcaacaagaccaccacatacatcagagagtatttgtacttcctgatcaagctgcatgagctcgaagggggaaagatccctattgtcctttccccatccatccactccctaagctacatggaaggtgactttctttttctgctaagcctcccacagccacctctcacttgctgttaggtatcaccgcttaaaaatttaccaaaatcaatcttcattgtttgttgttaaaataaaatatatagcacctttatgagaacgaaggagcacagcaagatacacactaacattatttggaaagttaaccaataaatcacgagaccatgcttgtaaagaaaccccagggatgaactaacagtcctatgccaaatacttttttcttttgtaataccctccctgtgccccttcctccccaaatgattgatttagaagcttcctgggcatcctgccattagaagcttcacacaagggtggcactgtttctccaggtttcctctggggtcatcaacagtgtagagttaaccagcttattgctatctgtgcactcaatctctagggtagccctgactgcggcacaacagcaatttccaggttaattaaatcctatttctgtccaggatttctgatagcctgcaaacccaagaagggcatggcgtgacacacaaatcagctggatcaagcaggagcaagggggaccaggcggcttaaagtgaatgcacagctgttcccttgctgagggaagtacatgccaaaacatcattttattaactcaattttccaatattaaaaacgtaagctggtaaatccaattatttagattacatcccaattctaaacaaagggcaaggaaagggtgggagggagggtctgttcattcaaaaaaaaaaaaaaaaaaaaaatcagacagttcgtgtctggcaaatgcaaaatgaccggcatggctgcgctctttgtgccggtgtgggagctggccctgaagctttgccaacttgctgaaaggcctattcaaaaaaaaaaaaaatttcctgtgtttccatccccaaaataattacccactccattcgccccccagacacacacactacaaacctggcagccactcaaagaaacaagagtgtgcccgtgtgtgtgcgcactggaggttgtggggggtcgggcaagggataccctctacccagggcaagctgcccaccaaattcaaatgcaagtgcggttgcgagcaaaccacacagaatggttgtaaacatcctgaacagtaaagagaaaataaacacatcctcaagtgaacccagaggctagcagagaccaattcatagcaaactctgtaatgagaggcactagcatagaccatatccttctaagcgcaaggtccacccagttcccacagttttaaacggtcagggtttgatttaccagaatgggagggcatcacacaatgacaaaacgggaggtcagctggctctgtaagcagagttatcctacgcagaatgcctgctttatggtacttctggagatggagccctagtggtccacagcctcatttcttgctttacacataaactgatggaacactttgtttatgcaaaaaaccgcaggatattaaatatttgcagcacttgtcttaattaagttacataggaagctatttagaataaacatttgccatagccggaatttgcgtaaagaaatcttttgttagttgaattcccctcaagatgaaacattatgatgttttgcttggtcagtggtacaagcaaaagagtagtggtgtcacaaaacctgagtttagttcacctaacttgtcacctagggcaagctgggtctttttttcttaggtggtttttttaaggactattttaaaaagggaagctaaggctctctctagctccaagcttctgtgatctttgacctcctcttaaaaaaacaagtggtacctgaatgtagtaatttctgtaataaatcttttggatctatcatttcgtaagagtagatgaaaagtcctgattattttggagaagtaaaatctaaatctccaaactgtcagtattgctaaagatttctagcgccaactttctaactgccagtaaaacagcaaaatatactgacttttaaagtgctagtactaccacctagcactttagaaggtggaggggaaggtgaaaaattcattcatatatattttagaaagatatcacaattccaaaaatccactcccctactcccttaaagattaaatagtagcaatacaatctgtaatctgcatttccttccacttagcccttccaatgaggagtaactcatttaggcaacacgttaacttacttcagaactgtgagtcacccttaggaacgctgacataactacttaaaaatatattcatcagctctatccatgaagaagccagcccaaggacaaggcaagccttgcaaatccaaacatcaccaccacatcaggaagacaccattcttgctcgcagacacttcactcccttggaatactaaagtggaaaacaggcatcagagagaaaggtgaatcttttttttttttaattccagggaaggattaggggggtaggaaagaggaggaaaaaaattaaaaaatcgaagataatagcactaaatatctacaagatatgaactttttcccaaataaaacatgacttggtgcatataaatctcaggtagctggtgacatcctgcacaaacagtatgaaaagtaatatgcagtacagttttttattcaattaataaaattattcaattatgtttcttgaaatcttctatggcatcctgaaatgtcagagaaccaagactgcctgaaaatcatgactgtcatgatcaaggaaacatctgacattgacttcttttgtgttctagaaagcaaccgtgtcaaatttgagagggatcatcattaatcaacaattaaagtggcaacaaagcccttttgttctgtcagtcacaaatgacacagttatagtttaccacctatggaaggctgtctgcgccgccatccccacacggcataaccccgttgttatgagggatacaactccaagcccaggagggaagagccacaaatactcttctcgtcaaagactgctggtctcaggacagtctcaagcaaaaagcagatagatcttaaggcagaagggactacataaagacagtaagagtcagagtaacacatgcaagtagctacagaatccagccaggatctggccaaaataatttctaataggctgttgtagttacaaggagtgaacaaattatctaagtacattcagttttaaaagcctagaagagcgagttaaaatgttaatttgcctttctactatctctcgatgggattccctatttagtttttaaaatatcatttcaacaaaaaccctagcagtctctcaattttagattactcaacacccaactgcaaattgccagaactctcctggcaatgggcatgtttggaaaggcaaagggaatgaccctgtgaggcgagaatcctgttttacttccttttttttttttcaaaatgcaagagaaatataagaagaaattgtattctacaatgctatacagcttattaaaaaataaaaatccaggccaggcgtgggggatcacctgaggtcaggagtttgagaccagcctgactaacatggtctctactaaaaatataaaaattagctgggcgtggtagcaggcgcctgtaatcccagatactcaggaggctgaggcaggagaatcacttgaacccaggaggtggaggttgcagtgagccgagaccgtgccattgcactccaggctgggcaacaagagcaaaactccatctcaaaaataaaataaaataaaataaaaataaataaataaagaaaatccagtggaatgcttctaagatagctgcagaaacttcccaccagaaatatcataccagatggagttgtgcggtaggtgaggtcctaaccatccattcagcacacgacagaccaaagcacaaaggcggcactcagagtgtcctctaagtcccagaaggaccagagtgggctctggcatcttacatgtcctccctctcatgcagtaagttcactaacagaaattttcttcatttaaagggtaacaaatagaaaagggatcccaggcaatttccccacccactgcaaatcttatgaagtagccagcatgcaccaatagatggcaatagcgagtctttacactccagctgtgggatcacccctaaggggaaaaaaaggaatgctaaattatgacaagcactagtattagccaatttttaggacctgcactaaaatctggtgccagttaagaacccagccactatttacagaaagtaggtctatcaacgctattagtaataccatctcacccctccaactcattacaccccaaagttcttgtatggaaaacatctaggaatatacaatccagctattttagatcccaagaaacatggctagagataaaacacacagcatctagccttttttggtgagtatcagaaaacctacattttctgattatcacattttctgagtatcagaaaacccacaacatctagccttttttgataagtatcagaaaacccacattttggggctctgacagaaatttatttagttgcctggaccttaatcatttgtgattttcaaagtatggggcattacttaaactatcaccaacaaaaatgcggagtgaagtctgctctgtaagaaaaggattcactataactgacacattgtctctgacaacatttgttaaaaatgcctaagataaggaaacacaatcataatttaaaaaatctgctaatagctaatgaactttaggaaaactaattctcctccaccttctgactgtttgagctctctgatgctgaaacaacggcacattctcccacttaaaaaccggagctattacagacacagtgtctgagcatctatgtcactggctgtagtaacagttctagaagacacattagtggaataaaaatttaaatacaacccaaagaaactgtgccaatggaaagtgggcaacagggcaaggtgagcaaatcaacttcctttctaacaatacccagaatatcccttaagcagccttaaatttttcccaacattcaacactgcacatggtaccatatttcaggccacaaaacagaaaccaaatggcatcactgaatcaaaccaaagggagggacctgaggggctgggaggcaggatgcaaaggggtcagcccaaaccttccaactcacaatattctacctcgattacaatcttaataaccattccatgacctcagacacctcgcctcagtacaacatgaaagtcctcccagtttttatcagccaaggaccagtccgctgttgcaagctgtgaatccacctgatgtcaagaatgtgcactaaattgaaagaggtcacatatgtagacagcggcagtggacaacagatgagcagtgagtatctgcaggacatacatgttcatctaattgcgtacggcttaaatgaaccctcaaagggtcggacgagaatatcttctgactacatctcaagtcaaaacgtttccaagaaggtaaagtcattctctctgattcacaaggggtcttgatgtcaagtatgttatctgtgtttcaggcacggaaccaacaacactctgctaaaggtacagcattgctggtttaacacatgtgcctcagagttcctttccagagacaacatgcttgcatttgctgtgacattataaaagtactctatgggtttttaaggctttgagccaagccagtagcagaaactcccaggggtgagactgggaagaatgaggaaatcaaaacaagcccttctcctcatccaatgaagctggcttgttacccctcttctttagcattttaactccatgacaatttctgatccccactcagtttccggaaacatcctgagaaaagaagtccaatctcttaaacaggactcaagataaaaacacccaagctgtgtgtaattctgaagggctaaaagacaaagacttcctgttcaattaagtccttcattaatccctcctgcttaagcccattttccttgtctgtagacaggaaatgataaagccacaaggtcagcctccttcagtgcagcttaaaccctccaaagaaggctgcagccacatatccatcgtaggttcctcacaaagcctcactatctgttcattttttctggatggcattacaaaacagagggaagggtgatcaaaagtataaccaggagtgaaagaaacgggagaataaattgcacgacatcctaataaaacataacagcaggggtgcaagtacaggaggaggatagagatccatgcaacaggcttataaacctccaacaatgaaagcagccaatgataagatttttcagctaaaaacttcttaaatgagcaatgtccaaaatcttatcttttaccccaacctcaaacctagcttcactgagtcctcttgcaccaggagtaattaatggttgtgatgcttcctatgagaggcactgtagctgggtttgcctcattctcccctgttccactgcctgaaccagaaaaagcaccccccacacctttttttttttttttttgagacagagtcttgctctgtcacccaggctggagtgcagtggcgtgatctcagctcactaaaacctcccccttccgggttgaagcgattctcttgcctcagcctcctgagtagctggaattacaggtacccaacaccatgcctggctaatttttctatttttactagaggcagggtttcaccatgttacccaggctggtggtctcttactcctgacctcaggcaatccgcctgctttggcctcccaaagtgctgggattacaggtgtgagccaccgagcatggccacagtaagggatttcaatggagcagatagaaggatactgtggagggaaactgcttcctagctcttttcaagctatgctgcccccaccacaggaaggcaagccaccattgaagagaaaggataacatttgcctaaaggatctttaaagcgggggctgccaggaggaaccacaataacaaagaagttggaattgtcagaaaaatactcacattttgtccacattggtcagaaacaatgacgtgcagaggaatcatggaaatgaactacatccttctacgctctgcaattcacagatgaaaaaagctacgtacgtacatctccctcactgctgacttcagcagaatgttatgccagccaactgggcaaatgcagaatcatgttcataaagatgtgggtgacaggcactgggaggggggatgcataactaccctctttataatgcaactttccgattccgccagcctcaacatgccctaatggtctccctttgatcaaagaggcatccatctttaactgtgtcaatccactgccaaactccacactcccagccatatatcagtcctgggaagggttgctgaggcttctcctccagcaatttgtaaatgagaacatttccagctggatacttcaagtttcctccccatcccaccaccccacaacccatttccaaaataccatcaaaaagcagccatagtaacttcatacccagaacaggccccaagacattaaacctgtgtgggtttggaaaacaatactaacagacactgacaaaaatattctatcttctatctattctgctaagggcccacttacctttccaaaaattcacttgttcttcttaagtggcctttctccaccctcttctaagaatttatttgtcctcccagaatcgcccttttgccccccacatcccattaggatggtaaattctttctttttttttttgagacagagtctcactctgttgccaggctggagtccagtggcgtgatctcagctcactgcaacctccgcctcccgggttcaagcgattctaggatggtaaattctaacctcctcttagagtcacatttctttgtgaactcaactaaatctgttttttttttccctgttgctaatctgtctttcatccatttaattagcaggctccccaaaactgaacttaagagggtagagaaaaagttcctctttttaaaatacgtttcttctatttttttatgtcatacaactttaaaagcagagaatgttacacaaactagcactgcagatagacaaccctagtaactaactaggttaagggaggacttccacaatgtaagcgtaaaggacagtgcataaggagctgaggccaagggttcatggtgtgattcagctggacataaaaggggacagaccttagggaatggataatgaaggagacacagtttctgcctttcaggtctgaacaggaagccttaggtttcatgaagtgcgacataatccagtcacagcctcacaacataaagtatgacctagactacaccatggagtcagtggagactgccattcccaaccagtccctgaaacaacctccctctgggacagaaattggcttgggaactcaatcattcaccaaaagggacctttccaggaagaaaagatgaccacacacccctgtgcttccaggtagaatctatgctgaagctgaacagtaaaaccgtaaaatcacacggctgaaggacagggtggcctgcagtcgggctctaagaaggacctggatatgctgggagggttccatttagagctccagaagtgcaagacctatgtgaccaggagagcactcaattgctctctcagggaagcacagtccacttgaacctcattctcccctgaactgaactcattataactgaataggaaaacacagaatataaacattatgggggaaaaaaaaaatcacaagaaaagccttccaagcaggagtccacaccactagaaacagaaaagattgctgggatttttctaatcatgcttctcaaacagggcatcgcaggtggtaggcaacaagtgatacaggagtgctgggaatagaagagcatggtccctttaaatgatagggaaggtggggagggaaaagctgggtagaggaagggcgtggcccctggctagggctctactcccaagacctaagtgaggaaggcacttctgccttcttgcccaaatgttgcattttccaagaccaccctgatctgccacgcccccatcctgggcctatgaaaacctataaaaacccaagaccctagcaagacatagacacaagctgctggacgtcctgaggaacacatcagcggaagacgacacaagcggctggttgtggagagcacggccgcagaagagcactggcaggccagtaagccatcgaccagcgtgcagcccgcctccaggggaaaaccatctcccttctggctctcccatctgctgagaggtacttctatgcaataaaaccttgcgatcattctccaagcccacgtgtgatccgattcttctgatacaccaagggtaggatcatgggttacagaaatccctctgtcctcaaggaagggagtctaattgagctaacacaagccgcctatagacagcaaactaaaggagcaccctgtaacacatgcacactgggacttcagctgtaaacattcacccctagagactgctgtggggttgcagccctacaacctgcccgtctgtatgctcccctagaggtatgagcagcggggcactgaagaagtgagccactcctccatcgcacgccctgagagggggacaagaaaaccttccccatttcaatagaaaccataaaatgcagcaaagcttttctgtgttttctgctagctttgggattggtttgctctgtactcctgaagttcaaagtttaaaaaaaaaaaaaatttggaattcatcctcaaggcactgaaactccaatgtgccaaacagcttatactattaatctactcgatttcaaattagtaaaatgtatttatttaaaattaaaaaaataaaatgtagcaaagcatggcatcatgagtcatttccaggaatacagcaggccaagatattcaagcaagtcattaaagccatcaatgaggtaataaacaaacaagaaattactgatggaaattctaagaacaaaagctagaacccagacctacccaaggagaaatgaccccacttttgtgcttctgacacaaacaaacctgaacttgatttccctagcactggcactgggaggaaggtggcatcctaccaccctccaagccctaaaatggggctctaacaggagacaactttcttacattcagctaggattcccaaaggctggatatctttcctgagaagttgtaaaacttaagcggccctcacgaggatttggaatataaaaatcatctctcaagccctgaatttagtttaaataatgttggactgatgataccctaaggtatgtagcaaaaacatacatgaaccctctgtaagaagagttttttcatctcaggcctcaatgaattccccctcaaacaacttttcacattcaggggaaataaagcaccatgaggaaaacccagcagatgtccaactgggaaaatgtcagtcagtaatttgaatcatcagactatgttaaaacaaataaaagccaagtttgaaaaacaggaaactaacacctgaaacagtgaacactgaaactaccactgaacaaacattgaaactaacatttgagtgtaacctaacatttgaaaagaaccaaacagagcttctagaaatcaaaaataaactagccagaattaaggctctcacttggcagtaacaaaccatttttctattgaaggaaacccaaacctacttgagaagtagaaagcaaaaatttcatgagttatatagactgcaaaacttcaaagtcctcttccagcagaggttaaggcccaagatacggaaagctgagaaacactgtcctatagatgaaaatcttatctccttctgatagatgaggaaacagcagatcaagaagggtatttagtgacttgagtaggattaggcaactattaaatactgctggagaatacacaataacattctatcaaaatacttgaattaacactccatggaattcacataatgggattctgagactcacacttggataaatgaatgggttcatttcctgttgtgcccaggggtgtgaagagcctctgttgtcatgacaatgaaaaaccaatgcattctcttccacatttcacagtggttaaaataaacaaagatgacagctgaccctatttgcccttctaagaattttctgaaaatctctctccccatcagctcctctagggaactggctcctcgtaatctatctatgtgcaacactctctgaaagataccaccaccctaaacaaccccacaggctaaaaatacaacaaattccattttaaaagataagtcactgattgaggagtatatggaattgtccatcacagaagcatgaattctgtgcatcaagggacagctacagtattatttaatgtcatctctcattctctgatctacaacaaaacttcgtttaaaaaataaaaataaaaaaaaaaactgttaggaacacagtgaagggtggagacagacttacggaggtacctgtgttttacgggcagattcccccactgggtataaactgtctcatgccaagctgaaacatgtgaaaccagggaaagtaaagtacactggcacatacatattctcaaccctattctactcctgacacacacacacacacacacacacacacacacacacacacacacacacaccctggagagtgagggctactggaaaaactcttagggcctaaaagaatttaaaaaacaggggtatgatggatattgcattattgtcagccacagtatcatccattaatgctaattataagagaaaagaactatcagggagaaagcactgtcaaattttccccccatatccccaaaagaatggagaaaaacatccccagtcctgtatgatgcaattgatgtgggtgggcagtagtgggtgcatcgacctggccaagggaagcaccatgtattgcaacccacaggaagctgggaatcatcttatgaatataaaattaaagccagcatatgaccgcctaatacaaaggaaatccaagattaaatcacattgtttgctctaataagttgcttacatcaggaaaagactttcacttggatgacatgcccttaggtaggatgcacgccacctaagcgactgcctaaactgaaattatacacacacacacacacacacacacacacacacacacacacagagagacatgggggttggggaggaggcatgcagccaacaactagactataaataatttcaaataaaccgcaagggaaggaaagacattattacttttctttctctgcacaaggcagatgaacaagctgaggaaggaaacatttggggacacacaaaggaaaaggtccctataaggaaatggggctacctggccctaaaaattcttaaccacagacataatcactgttcacttacccagcaactatatatagaatgggtgcttattatttaagggtaataatataatacgtgctttaaatcacatagagccctcggagtggtgcttatcaaagtgtgattcttcaaccagcaacaaaagaatcacttgggagcatactagaaatgcaaattctcaggcaccacctcagacttaactgaatcaaaaaccctcagggcaggacctagccagtctgtgttttaaccagtcctccagatgattctgatgcacgcttacatgtgagaaatactgggttatagccaatgctataaggtgtaatggttgcatttatcagacaaggaaacagagaggctcagacacttttaagtagcttttaacagcttagatacaaaccaaacatctaactttattcaaaaacctgtgcttctgcagcaggagaacagggtctggagggaaggagcctaaggacttcctagaactaaatcaaacggaaaaactgccaaccttctagcccaagtaaataactttgtaacattccaaactttccagctatggcaggaaacttcacttcatcctcttcattcacatggggcatacaccaagtaaccaatgggaaacctctagagggtatttgaaccccagaaaattctgcaaccagtgctactgagacactggcttcgagcccactcccagtctgtggagcgtacttttcttgttgttgttgttgttgttgttgttgttgtttttgaaggtgagagtagctggaggatgacagagtcccaagtctgcccaggctgaggtgcagtggcgcaatctcagctcactgccacctctgcctcttaagttgaagtgatgcctcagcctcagcctaccgagtagctgggattataggcgtgagccaccatgcctgactaattttgtatttttagtagagacagggtttcaccatgttggccaagctggtcttgaatccctgacctcaagagatccacccgccttagcctcccaaagtgctgggattgcaaacgggagccaccacacccggcctgtagagtgtactttcgtttcaataaatctgtgttttttttttttcattgctttgtgtgttttgtccaattctttgttcaaaacgccaagaacctggacaccctccaccggtaacacactggtaccagctgaactgtgggtctcagtggcttagcaaaagtgcaggagcactactgagcacagtgagcctgtgtacctaaccaggcattcctgagaacaggcttcctactggatttatttcacaagagataagagtcctttccagtggcatacctttagtgacttggcttaagaggatttcaacagaaaccacaaaacagactgcttcacagctctgattcaatgtccctgaataaagggacaacactggagacagaacctctctggaaaaaaatctatggggtcattatccaaactgccatctgtaaatttcttacagtgcttaaattgcttcattgaaagggaaaaagataagagtcttcaacactttctttagaaacttaatttcaattaactaattgcaatttaaaattatatcctggtcttctgaggcttgaaccaagaaatgtgaataatatgtaaagagcttgtttacactaaaagtagtggaggcagtggtaacagcaacacagaaggcacaagccgtcactgtcttcaaggtgtttgtcagaattattcctcatgaccttcagaagggtaaagctgaaggagccataccctcctctccttggcctcaaacaattcccaaaacccaaacagcaggaaggcatcgtttatgagacatacggatcgcagctgatggaaaacatcagcgtgcatttgggttcctaaatcatttcaaaacattaatcaggaagactcacagcacccagtcctatctaagccatagattcctcatttagggaatgggatgatctcacattcacatgatctgtaagggctctatttatcccagcacagttcaattaggctgaattgcaggaggcataagaaatgataatcaggagagaaattatggcaaaggcagttcaactccctacaaaggggaaaaactacaagctccagaaaggccaagtgccagtccacattacacaatggtatttgccggaacaacaagcagattacagccctgcacggtaccaatagtctacaggctgtcacagtgaatgcaaacatatttcttgggggctgagtaacaggctgaacaaatttgtaactatgttccagaaaaagaatggctctgaaaacaacatatatttagaaactgctagaatcccatcctacacagttccaagttgacagaataataaagtaccccaagactggtctggatcatgtgcagttactcaaagcagcccctacagaccattcattcccccaagagttagcagaagcttaagtgggcttggactggaaagcatgccccacaagtcccacaacccccaggtaagtaggcactgacaaaagcgatttcatcaccagattatcaataagcccttcacagatggacatctcactacacccgacccaatgcttgcttagtgcactttttaaatcatattagaaaacaatttacttaattcaataaagcacctggcctattatactgttatatactcaacagaacagtatttcatataagagaagcaacatctcaaaaggcctcatgtatttcaacatataattggcaaccacatataaacagcaggaaaataactcagtatcaagcatggttcttgttttctgtttaaatgttttccttcttcccacattttgtatatagtaaacgaaatgaattaacattgaggtcaattgtacatacttgaaatattctataaagtggtcatacatggtattttaatgtcacagaaattgtcttgataactaaactccaggaagataaagaagcaaaagtacatcttgtacctaaggaaaaaacaaaatcttagcaagaacgtcagatatatttaatggcatccttataagacattattttattatcatggacatagatgcagaggttaaatgtttttatatttgaaagagtccagaaagctggagttaaccctaagttggcaccaagggaagaaccagagaatcttcatgcaagaagatggaattttgccttctcttggcatgactaattagagagggctgctagcaattcagcaatattataatgacgtctgaggactcacaagcctgctgtgaggctagaaatacacacttccttattactaatcagatgtaccaaggagtaaaatttacacggtacattttggcttccctgtggtcagatgtggagtttctgtacccagggaaaagaatgtagaaacgtgtgtgtacatttctctctctcgcagggccggagacaaaacggtatgtatcactaccaaaaacgtgtactcggttctttcctaacacttcaaaaaaacaaatccaatgggtttttacttcagacacacacacgtgtgcatacaccccctccaagatgatagtgtgcaaaagaccagaacaattctaaataggagtatttgcctctgaaatgtgatgacccctttagaaatgtttccttttcagtggagtgcggtggctcaggtctgtaatctcagcactttgggaggctgaagtgcaaagatcaattgaggccaccaggagttcgcaaccagcccaggcaacacactgagacccaacctctacaaaatatgaaaatgtatgccaggcatggtggcatgtgcctgtggtcccagatactcaggaggctgaggcgagatgactgcttgagcccaggaatccaaggttgtagttagcctatgatgacaccattgcattccagcctgggtgacagagtgagaccacaactacctcaaaaaaaaaaaagaacaagaaaaagattccttttcctaatagttggtttagctactcttagaatttgtttacacactcaaaaacatgcaaattgttattccacagcagatactctgccaccattggggatacaaagataaacaaggacccatccctactcaagtggacatagcctagaaagcaaagactacctattcctcgccccacccaaacacaggcaagacaatcacatatggatgatgttgctttcaaccaattctgtgaatagctttaagtatgaggatggagctatcaagacaattaatgaggactatactctagaagttttttttttttttggggggggggtttgttttttttttgttgtttttttgagacagagtctcgctgtgtcccccaggttggagtgcagtggtgctatctcaactcactgcggcctctacctcccgggttccagcgattctcctgcctcagcttcccaggtagctgggattacacgtgtgtgccaccaggcccagctaatttttgtattttaagtacagacaaggtttcaccatgttggccaggctggtctcgaactcttgacctcaggtgattcgccagtcttggcctctcaaagtgctaggattacaggcattagccaccatgcctggcactagaagattctatcattgcatgagttcatgtcctttgtagggacatggatgaagctggaaaccattattctcagcaaactaccgcaaggacaaaaaaccaaatatggcatgttctcactcataagtgggaattgaacaatgagaacacttggacacaggaagggcaacatcacacaccagggcctgttgtggggtggcgggagggtggagggatagcattaggagacatacctaatgctaaatgatgagttaatgggtgcagcacaccaacatggcacatgtatacattacgtaacaaacctgcacattgtgcacatgtaccctagaacttaaagtataacaaaaatatatatctaacaaaaaaagaagattctatcattgcaaattaaagccattgagcctaaaggaaaaaatattcttgcatgatatttaccttattgtgtagaaaaaaacccacttaccataaaaacccctccttaaaatttccaaaagcagaaatgaacccaattttcttctaaaacaagtcactttggttgctgcctttcatcacccgccagactcccatcttacaataaaataggagggaggcagtgagggaacaggaagtatacggcgacagtagtaagaagaaacattcaattctcatcttagttaaagcactgtgcactacttgcaattgcactaggcagtcaagtgaggtattaacatcaagcagcactctgcattaaaaaaaaaaaaggtatgtctaacaaccccatataagcactcacatgtgaaccacaagtgacattaatggctgtcacctccttcacaaaccaggtgactccaagccctcacaattccagcatctagtgcctttcacgtaagatgccaggaaccagtgtctacacattcacactaaggaagattcaggaactgatcaaatgttcccaggagggtcagaaactgctgaaaaagatcagggtggtgtttagacttgtcctttgggggtgtgaaaaggcaaggagggcaaagggatgagacaaaaatgttactgtttaaaagcctagcaagagcttagaggaggaaggaaagaaacttgtatccagcagtttccatggcaaccacaaagcatactagaccataatttacatggggggtggaagtgatatccctgcaatctgatctccgaggtaacagaaaaaggaaatggccactgcagtaataaaaatgaagttccagccttttttgttttctagaaaataaacaaatgcggaagaagctagtatgtttgccaggagcctgaagcaaataatgggggtgaatatgaagtcccaacaagtgttcgccaacatctaaacctgcagaggatgcaaatattctgcggcaggtccaggctttgcgattccttccatcacactacaactcacatgctctgaactcttaggacagagtgtggtgcaggtttatgcagaagaattgagtatctaataagacctctctagagacagacccaagtctagcaggaacaggaacttgttaaagaaagaagacccaggtttcaaactcataaaacacaatttcaggaagataagcataaatggcaaggttaaaaataaattgcacacagccacaaagggttgccagacacagccctcctttacattcctgcaaagtgctactccaaatatatcaaggtgctgatgtaccccccattactcaggccagttatgtaattctttaacaaacacatacacttaaacaatgtaaatgtatactataaataagccttttgatcaaaaccataaaatggcactgatggctttcaaatggtaaaatctcctgacctccttgtaattatccaagaatctattaggcttaagtcacctcatcctctgggggttggaaaaacagcaagcaagcaagattggggtttgtttttcatttactaaggtgaagacaggaaaccctcttggagctcttccactccctactataactgaaggaagctagtgctgtcagtccacatccattcaacaaatattgattcagtgcctctgagcacatcttggcttagactgatttgggagccaacacttaagcatagtaacctcctacatagtgtggagacaggttatttcatttaattctacaaactacctgggttcttggtcatttccagtctgcctagctgggcctgtccaatgtgcagcctgcccaacatccacgtgcgtccttttgaatatcaactaaccatcttgcctccagctcaccatcttggtaaagaaaagtttataattcaatcctgccttctctctcagccagcttgtgaagtccatcggtaaagagaatgccctgaagcacacaaagccttctagaagcagcctgttaagaagcacaaagaacccttcacttgtcaaacctcggccccactcgaggattattaagagtcacaatctcgaaaactctggcccttcctgagtggcaggtctcaagtagctgctgtcccctcccaaggcaaactgcccagtactcaagaagctcatcatgttattactataactgcactgcacccagctaccatgttcacagaaacaggtacaggcctgtttccctgcattagattggctgagaaacccacagctggcagctcacatcatgctattaggacgtcaaagaggactgacttacccagaaaagcacaatactaaaagggtctcctccttttctcgctcttattacatctcccagatatgggaaaatgaagtgcacacatgaccatattgaagctgccgcaatttccctagtcactctgcttgtgttccacaaacttcacgcatctttcttttgcagcacacttgcgctcttagtccatttgaggcttctattacagaatgcttaacactgcgtaacatataaagaacagaaatttatttctcaccattttaaagactgatggacaggcatatggtgatggccttcatgccattacctaacatagtagagtagaaggcaacatatggcaagagagacaaaagggggcctatcttgtccttctataaggaatccactcccatgataaaggtatgaatccactcccacgataaaggtattaatccactcaagagggtgcagccctcatgaccccaacacctctacattggggaacaagtttctaacacatgaaatttggggggcacattcataccacagtacaccgcaacaaaaattatttacttctctactttccctgggatgcagatttctgtggctcaaaacaggcttaaatcaatcatatgtagctgcatctcagcacctgagaaaactattagcatgcgttttcatttacaaattagcacctatgcatatgtgctccttggaggtcacaatcctctgaaggttaaaatggaatcactttgccacaccccagaattctcaggccactccaaaaattttgaaggtacaactatactattctctgtttgtcatcagtacattatgatggctcttcattgacttatttaaggtgagcagacatcatttactgagtctgtattacataccgggagccttgtctcccagacaagtatagtcttctgtgcctcagtgttctcatcggtaggatggggatgataataaaataacgtatcttaatgattttgctatgagaataaaatgggctaacatatgtaaggaatgtaaaacagtggaagtggacagcacatcataaatgctatgtaagtgtttgctggtttgttgttgttgttgttgttttgttttgtttgagacagagttttgctcttgttgcccaggctggagtgcaatggcacgatctcagctcaccgcaacctccgcctccttggttcaagcgattctcctgcctcagcctcctgagtagctgggattacaaggatgcgccaccacaccaagctaattttgtatttttttagtggaggcaggggttctccatgttggtcacactggtctcgaactcccgacctcaggtgatccgcccaactcagccccccaaagtgctgggattacaggcgtgagccaccacgcctggccaagtgtttgctgttattaacatcaacagagccactctgcaaaattgctcttctttcagataactgactcccccagggacagagtattactttagattcaagcccagtctatatgaatctataatcataaattttgctcttttctcctaatttctaatcaaagggttaattataagactgggctagaaaaacatgtttgacactaagccacaacatttggaggattgtggagggagaactcctcctggtgtaaatcaattccaaatcaaaataagccaagaagggcttgaagatcaagagacagtcaatggccaggcacagtggctcatgactgtaattccagaaatttgggaggccgaggcaggaggatcacttgaggctgggagtttgagactaatgtgggcaacaaagcaagaccccatctcttaaaaaaaaaaaaaaaagaggcagccagggatgaatacatacaggtctatccacgtctgtgtgcctcccagaaagagtttaggaatgcgggctcagatgtctaagcagtgaaagtagtaagtactggccaaacaacgcagaccaacgaggggatgaagcctgaccactagagaaagggaccagaggttaacaaaaagaccctccgggagaggaggtgtcttggggaaaacaaaaacggagctccacccaaagacagggcacctgcaaaggcacagcagcaccataaaggtattcacagttgcaggaacccaaaacactggtcaccagacacatgttcacacctcttccctatcacggccccaagggaagcagaggccagcaaggagtggagatgagaagtgacaagcttctccagcatcctgcaaacagatatcccataccaaggataaaacgtacgtgctcagcccagggtgaggtcaagcatacagaggtacctctcagacttaattatcctgatctaggtagtaacaatttgaaatggaacctgcagtccatcctgccacgtaagccacacaaatctacccacacatgacccataaaagtgaacttaaaataccagcctgtctttgtcccatgactcaggaacaacttgccccacagtgttacaccaacaaaccacattccccatccaaactcttccttctgtgatgttgaactctacctcctatattaatccttctgaatttagtagttgcacaattcttcccaaaagccaaaaccactatcctgtccccaacctcaaaaaacgagctggacctcagctttctttccaatgacagatgactgggatgcaggccaggcatagtggctcacacctgtaatcccaacaatgggaggctgagtcaggcagatcaaccaagcccaggagttcgagaccagcctgagcaacatggtgaaaacctacttctacaaaaaatgaaaataattagctggacgtggtggcacatacctgtagtcccacctacttggaggctgagacaggaggatcacttgcacccaggacgcggaggttacagtgtgccgatatcgtaacactgcactccagcctgggcaacagagccaggccctgtctcaaataaatgtttaaaaaaaaaaaaaaaaaaaagactaggctacacctgtaagccttgatagcatagtcaagtaggcctaacccatgagaagacaagatggactcaacaacaggcgtcattaatgagaaaaaaggagctgcttcctgtaaactggagcaatacaaaagattgttttataatcccaaaacagagtcacataagcagtattctgccaagcacttaaaattctgagagagggagggggagcggggaagcccacacaaaaccagtcagatttcgtgtttatttgaccagcttcatctattgtgtagacacccatggtggggctctatttcctgatggggaagcagaagtggggagacacagccaccatcttgggtacccctagagcagaggtgagaaattgtgagttaaatgaggtctgaaccaagggtttttgctgcagggaaagaacctgaccacgaatgtcgatgagcagcatgtgcagcctccaggaaacagagcatgcacagcccagcgagaattgctggcacactcagaaaacgcttccttagctctgtgctatccaacctcagacactgaaacccaggaactcaggttcaccttgctgatcaaggtgaaggcacagtgcgtgaaatacaaacttccctcccacacttggaagatttccatgggaaaggtgaatatgcacaagcaagcactgtgatgtgagccaccccaaacctaccaactccagctcactgcaggaaaagtaaagaaaaagagtattcgtccagaaggacagagaaccacccactaaaatcaacaagtaatcacagatctacttgcagcagctacctgaaacaacagtcagctgagctgggccctctcctggacgcgcttctctccagggtccttaaacaaaaggacctctaacattggaggacccaagagaggatttcgggagctgtaggttctgctcaagataagctaaaacttttcccctttctatccatcgctcagtttataatgaagcaaggcatttcatgtacttcagaaaagaaggaatacatcccttggcagaagagattatttactagaagaggtcagctgaagagtaacactaggcatgacagcaagaggtgcccctcagcacagttgtggaccaggccagaccccagttcaaactgcacccccacccccagtacagctcaccaagccaactgctgtccagatgcacacacctgaaaattcagacctacatttgctacaacttatggaaggtgacatggtacagtggcaaagtccaggcattatagatgtgaaagcttagatccaaatcctattaactcagctgccaagtgagggtggtaaaaccttaaaaacaggtatttcaaaagaattaaggtaaaaatttttagcacaatattatctaggctaaggtcagttcttcctaacggaagagacagattacatagcttcaaagaaggacttctaatagtcacaggctttattatggaatggagtttactatttttattataggccgaatgcttatgtttattaattttgaattttttttcttggagtcagggcttacttacgctgttcacctttttttttttttaaagactaacaaaactaaatgaaaagctatgaccgtggctagttccatttcctgatggtacgtgtctctctcacactctcattcaacattcaaagaacagaaagaacttccgcttttagtgaagctagacaggatttatacctcttgcctgtctgaaagaactaaaaatccacacaaaacaacggccaccatatagcaacatactgtgatccctgacggatggaaaacaaatgatccctccagctcactgccctgagagaatgtccaggctgcagcagttacggaaagggcaagcagagccggggttgagaaacacaaggggaggccaaggtgatataatgtgtaaggcagagcacagcagaggccagagccacacagacaacaatggaatctgccaaaggcgctcctcatgtcttccgctgagtactaacaagcacatttgtgttaggaagctacccaagagaaagtatttccagaaaggattagcaggaacagtatccaaattgtaaaagcaccaggaatagtgcccattcttactagcctacatggtaaacataatccataggacatcaagtaaaatactcgtaagggtttttgcctgagtagcagggaaacaatgcctcacagtaaacactgctttggccctacctaaccatgcttgaaaccaagatccaaacagatcaaactgttccctaataatcagatctcagaacaatgctcaagaatatgtagagaaatacgaacatttcccacagccagagaaaaatttagtgtctgtcaagtaataaaaagctaccagacatgcaaagatgcaggaaaatatgactgatgaggaggaagattaatcaatcaaaactgttttgtaaataatggaagacaaaaatagcacatatactcaaatatctcttgtaactgtactccacatgttcaagaaacaccaaagaataagcatattactagagacactgaagattatggaaagaccaaaatctaacttcttttttttttttttatggagtcttgctctgtcacccaggctgtagtgcagtggtgtgatcttggctcactgcaacctccgcctcctgggttcaagcaattctcctgcctcagcctcctgagtagctgggattacagatgcgcaccaccacgcccagctaatttttgtatttttagtagagacagggtttcaccatgttggccaggaaggtcttgaactcctgacctggtgatccacccgcctcggcctcccgaagtgctaggattacaggcgtgcccagctgtaacttctaaaatataataacaatgtctgagataaaagatatattcaatagtcttaccagcagatttagggtataaactatctaaaatgcaacatacagatcaaaaaaggaacaaaacacatgagctatgggacaacttcagagtaatatatatgaaaattaggtccccaaaggggagacgaatgcacacgaaaatatttgaaataataatggctctaatttttccatagtaaatgaaatctacaaacctaatacactcaatgaatctcaaactctggaaataaaaactgccaaggcacatcgtatcaaattgcctaaaaccagtaagggattcaaaagaaaattgtggtaaatgattgctcctacaaagctatgaaaataacaacaggattctcatcagaaatgatgcacatcgggacagtggggcagtgtcactgaagtactgatggtgaatgactattaacctaaaattttatacccagcaaaaatatctataagaaatgaaggtgtattttgtataactgcatgtaattctacaattatcataaaagtatttttttaatgtgggtgaaatgagatcttcccagacatacaaaagctgaatgatcaacagcagacctaatgttagaaatgttaaaatccttcaagcaaaagcaaatgcaaatgatactagaaacaaaaatggcaactacgtagataacttgaaacagaagataggcgagatttacccatatttactttatatttacttccacatcttttgtgttcaaaactgccacatcataatctattactcaatttttctttactttctgtagtagagagtacatttcacccatgataactctaaagttgaaaattaaactagtacttctcttatttataaaatatatctccaggttgtaagaacaaaataaactccaaataacctgatcagtggaagcttctaaatataaatcaagggttaagagaaatgttaagccttttgctgattgttttgctttcacttttttgcatttaatagtaaattatactactaatttatttttgatacaggaatgagtaaaaactaggcacttatttaatataattccaattattaaggatgctcactttgaataatcccaattcatgcatgctatcaagaagattcgtatacatttgggcttatcttcctttcaaactcgaagtaaataaaagtattttataccatcaaagtaactcagaccaaaaagaataaggaacacagtcgtgcagacaatgtagctgtgaatatcatacctgttaaaagcctgagagaattctcaccactttcaacatgtcttcatatccagaggcatgtcatatctcagagtacactgagttatgaaatccatacacttccaatgattctttacattcaaaattcaatctaataggacaaacagtgtttaaactaagtcctattggatcgaaagcctaactaaaatacagcagctccttgtttaacaaaaaagttacatccctttagagacagagtcggtacttctgtactagttaaatagaaactcttaagagtttttattttaaagtctgttagtacacaaaaagcaatatacccttctaaagaatatagttgaccgggcacagtggctcatatgcctgtaatcccagaactctgggaggacgaggcgggcgatcacgaggttaggagatagagaccatcctggccaacatggtgaaaccgtctctactaaaaatacaaaaattagccaagtgtggtggcatgcacctgtagtcccagctactcaggaggctgaggcatggaatggcttgaactcgggagggcggagggtgcagtgagacgagatcatgccactgcactccagcctggcgacagagcaagactgtcttaccaaaaaaaaaaaaaaaaaaagaggaatatagttaacaagagatcccaacactaaacattagggttctgggtctctccctaaggtgaagcaatgactaatgcatgagcagccacgatggaatctcctcaccccaccactcttgcctgctccattcaggcaaatactaggtcgcaccaagctcggcagaggaaatttacaacatacaccacagggtccttcccgtgactcaataacttcaaaagagggagtacccatacatttccatctgcctacagatggctgtggtagggctgacagagaggaaagatataaatcatttgtgtaaattaaaaaccctctgaaacaagtcagagaagtctcgaaaggatgtgcatactcacatgtagcaattcatgtgtcacatatactgacaatggctactaacatctaacatacagagtaccatttatacatgagaattttttatttatttattcgcttatttagtttttttttgagacagagtctggatctgtcccccaggatggagtgtgatggcacgatcacagctaactgcaacctccatctcccagactcaaacgatcctctcatctcaccctcctgtaactgggactacaggctcatgtcaacaggcccagctaattttttttgtattttttggtagaaatggagtttcgccatattgcccacgcaggtctctccaactcctggattcaagtggccggccggcctcagcctcccaaagtgctggggttataggtgtgagccattgcacccaaccaatacaccaaaattctcttcaagaattaatttattcaggtcacaaaacaccatcaggcagttactactgtgattcacatctttcagatgagagaactaaggcccagacatattatataacctgcccaacaggtatgatacaatacctgttgcattatataacacaacaagtaaatgttcaagatataatgagaagtcacacagcctggccccagtctatactcttatgctgcaccacagtctccacaaaacccgcttaagaaccactgttctcgtgaaatttttctaccctcttccccctactcacccacagataaaaataaacagttaatcttgctctctattttagtcgccaactcagatgacctcttttgaatcgtacacttcagatctcgtatttacttgcatctaaaaatataccatcaccaaattaactgtacattatcgtttcattcctcaaacaaataatcctcacctccataaccatccttccaaagagtttctgaccacaagtccacacccaaatgaccaaaatccatccattctggtttctacacatactgagagactgatggggcaaatacacactttacaagaagaactgagtggaataaaagggcaaaatgagaaaggagataggcagggccaccttcacattcagaacaggatgaaagtctctgtaatggttccattctaaacaatataagttagcccctctccctctccctctcccccctctccctctccctctccccacggtctccctctccctctctttccacggtctcccactgatgccaagccgaagctggactgtactgctgccatctcggctcactgcagcctccctgcctgattctcctgcctcagcctgccgagtgcctgccattgcaggcgcgcgccaccacgcctgactggttttcgtatttttttggtggagacggggtttcgctgtgttggccgggctggtctccagctcctaaccgcgagtgatccgccagcctcggcctcccgaggtgccgggattgcagacggagtctggttcactcagtgctcaatggtgcccaggctggagtgcagtggcgtgatctcggctcgctacaaactccacctcccagccgcctgccttggcctcccaaagtgccgagattgcagcctctgcccggccgccaccccgtctgggaagtgagaagcgtctctgcctggccgcccatcgtctgggacatgaggagcccctcggcctggctacccagtctggaaagtgaggagcgtctctgcccggccgccatcccatctaggaagtgaggagcgcctcttcccggccgccatcccatctaggaagtgaggagagtctctgcccagccgcccatcgtctgagatgtggggagcgcctctgccccgccgccccgtctgggatgtgaggagcgcctctaccgggccatgaccccgtctgggaggtgaggagcgtctctgcccagccgccctgtctgagaagtgaggagaccctccgcccggcagccaccccgtctgggaagtgaggagcgtctctgcctggcaccaccccatccgggagggaggtgggggtcagcccccgcccagccagccgccccgtccgggagggaggtgggggggtcagccccccgcccggccagccgccccgtctgggaggtgaggggcgcctctgccaggccgcccctactgggaagcgaggagcccctccgcctggccagccgccccgtccgggaaggaggtgggggggtcagccccccgcccggccagccaccccgtccgggagggaggtggggggggtcagccccccgcccggccagccgccccgaccgggagggaggtggaggggtcagccccccgcccggccagcagccccgtccgggaggtgaggggcgcctctgcccgggaggtgaggggcgcctctgcccggcagcccctactgggaagtgaggagcccctctgcccggccagccgccccgtgcgggagggaggtgggggtgtcagccccccgcccggccagccgccccgtctgggaggtgaggggcgcctctgcccggccgcccctacagggaagtgaggagcccctctgcccggccaccgccccgtctgggaggtgtagccggcagctcattgggaacgggccatgatgacaatggcggttttgtggaatagaaaggggggaaaggtggggaagggattgagagatcggatggttgccatgtctgtgtagagggaggtagacacgggagacttttcattttgttccgtactgggaaaaattcttctgcctcgtgatcctgttgatcggtgaccttacccccaaccctgtgctctctgaaacatgtgctgtgtccactcagggttaaatggattaagggtggtgcaagatgtgctttgttaaacagatgcttgaaggcagcatgctcgttaagagtcatcaccactccctaatctcaagtacccagggacacaaacactgcggaaagccgcagggtcctctgcataggaaaaccagagacctttgttcacttgtttatctgctgaccctccctccactattgtcctatgaccctgccaaatccccctctgtgagaaacacccaagaatgatcaataaaaataaataaaaacaaacaaaaaaatatatgttataaactatgtaaatatatcatttaaaaaaaaaacaatctcacccaccacaatgatcaaaagaaaaagaaaaacaacatctagaactaaaaacaagactcagccttcagggtcccaccagcacagaatctccactcatcttttcttgggctgccctttccgtgaacacagcagacagattctgaagggggactggctttccttttgtaaagaggcatctcagatgacctttcaatggctaggtaaaaatataccggttttgagttttgttgttgttgtagttgcctccataaagaaaaactctgaggaagagaattagaaatttgaggaaactccaaaaccctcaagaactctggactccactggtttctatagctaaaaagatccctagtgtcaagtaaaggcactggcagtaaatacacacagcaaaatctgactcagggggttttctgcagaaaaacaacacttaagtaaacacatggatgttttaactgaagaattaaaacatgttattagcatcatcagaaaaatgtaattgcttcaacgtgcaggttggaaaagcagactagataaagttggaactgaggctggcatcagtctccaccatagatttttattttccataagaaggaagtcaagcacatacaatccctctcagtcttcccctttccccatcaccctactgtagacaaaaggcatatttttttgctgatgattctaaaatcatgcacataaaaggatgtgtagagtaggagtaattaaatctacaagtatagctaactagcaattcgtatcattctaaaaaataaagtgaaaatgctctttccaaagcacatacataaattatgaccctgcagtatgatctgaatgtggcccccaaagttcatgtgttggaaacctaatccctaatccaacagtgctgagagggtgagatcttaagaagtgattacatcatgagggatctgccctcgtgaacggaataatgtcactatctagggagtgggtttgttataaatgcaagcttagacaggcgtggaggcatgtgactgactgtagtcccagctactcaggagtctgaggcacaaggatccctttagcccaggctttagagaacacagtaagtcatgatcacaccactacattccagcctgggtaacaaagccagatcccatctctttaaaaactaaacttaaaaaagaaaaacaaacaacaaaaaccgagcttagcactttcttgtgctctcttgccaagttataatgcagcaagaaagctctcgccagatgcagtccctcaatctttgaataccaagcctccagaaatgtaagccaataaatttctgtatttctaaagttaccccgtctcagctattctgttacagcaacacgaaacaaactacaacaatatgaatttttaggaatcagtattttctcctacaaagtctaaagaccaaaagagaatgcaaatggtcagtcttaaaagctcttccctgccgggcacagtggctcatacctgtaatcccaacactttgggaggccgaggtgggcgggtcacctgaagtagggagaccagcctgaccaacatggagaaaccctgtctccactaaaactacaaaattagccgggcatagtggcgcatgcctgtaatcccagctactcggaaggctgaggcagaagaatcccttgagcccgggaggcagaggttgcggtgagccgagatcgcaccattgcactgcagcctgggcaacaaaggcgaaactcagtctcaaaaaaaaaaaaacaaaaaaaaaaaaaacaaaaacacaagctcttcccatgtataatgtttcagaaatttaaaactcgcaagtaaaaaaaccagcatctgtttaacaatccactaaagatattttaaaattaaccattataggtagttactttaggctcaacttctcatcttcagagtcagcacattccattaccctattagaaaaggcattctgtatgtgcgttgaagacaggttacatattacagtttcaacagtatactaccgaagctctggaaattcaggtcccaagtcatttactctgcttttgaaggcagggttcatacccaacccactaaatactgacgaaggatcaaaacaaaggagttcttaagactttaagttatcattttatgcttgctacataccctgcaacaccccaagaaatgcatgccctgctgggtgtggtgactcacgcctataaccccagcactttcggaggtgggtgggtcacttgaggctgggagttcaaggccagcttggccaacatggcaaaaccccatctctactaaaaatacaagaattagccaggtatggtggtgtgtgcctgtaatcccagctactcaggaggctgaggcatgagaatcgcttgaacccaagaggcaaagattgcagtgagctgagattgcaccaccacactccagcccgggtgacagagcgagactcttgtctccctcaacccccccaaaaaaagaaatgcataccctaatgacactacacatttgaaggctacaaaatcttcctcctataatcaagagtgccccagcccatccccaaaatctacccaagcctatcaaaccttaatccacataaaaccttgatgagaccagaaccaagttagtaggctgtaatgaatccttaattcagtaagatacttgacacattaataattaaaaacgatttgccaaggctaagttttccttcagctaactctgaaaaagagttcctcttttctactaccttaaagaattccagttaaatgactgctttgcactcaggtgccacatgacactgtggtcccatacaaagagaaagctagcaacactatcttctgagagaatcacagtgagttagggacaaagagtccctcctccttaagaatgaagcctacaacacacatcactgcacccggatgctgaccagctctcagccagaagtgagggtgatggccagccacatagctaaaggagtgggtgcccagactcagagaattctgctccccaaatggagatgaaagttgatgccagatgcatgccagatgcccatgttggaggcatggataatattatcacacattccaatatatttactgacacaattttttacacatccttaaaatcactctcttgtgataattcatgctttaaactggaacaggggaatgtttgttatggaatatctgtaatataacaggttcatcactgagacactctttttaaaggagtgacatacaaagctcagtacacgggaagatcctaactatactaataacgaatcttatgacatcttctaagacaaagtgctgaggatgaagagaaaatgagagaagaatacagattcaatgtatttaaaaggctatttaaaagacgacaccctcatgatggagaaaataaagactttgagctatgcatctcaactttcagtcctgaaaacaggaatcttaaatatctacacatggctaatcttgtccttttctcttaatttttcactctattctgttcttctttagatagatacatgtagattgcttctaaaaagtaaattctccagaatgagtaaacagagatgaactgacaagggggattttttttttcttttccttcaatcccggaaacgaacaaattctaagaaaaagtcaggaagctggtcctccaggtaaacataaagagaacaaagggaaatataaattctaacagggaaaaaaaggaagtaacatatcaggtatgaagtagggtagatactaggcaaagggtttcaaaaacacccaagtaaaatcattattataaaatgtcactgccactgtttgaccatgaaaccacaaactgttatcaaactactaaagccaacttccttaccaaactatctgaagcttatttaggaaagccacataaaaataactgctgttctaagttttaagcaccaattccacagctactaacttggaacttggtaaaacagcaagggattaaaaatacacagtgtaatttcagctttcctgacaaggaaaaaacgtctcagaaacaccacatttacttcttcaaatttttagaaagatctcttttcagaaatggcaaaacatcacctaatatatatattcctcaagatggctgctgctgagaatcaatttaaatgaacagttaagacaggcattacaagctggcaactctttggctaactgttccagcaggaacatgtgctgtcagtccagagcacttttttttcccgtttttaattataattattagacaatacttagaaagcagggcatttgatacgaaacctcatgattctggctcctctatgaaaatcaagagattgggtgaatgggctcacgttatcatgtggtgaaaactggcacctgagtttgcagtccctggttgaaggtaccaatattttcagccttgggtactaaccttttcctcgacggcccttcttcaaaatctgaagaactaacatcgttgctagtggaggacacttgggatgcatcgtccttttcattctctgactgttctgatgctggtcctaatcccttagactggtcattaccaaggagccctacaggtgagaaaaggggacaaacacttaaatacatcacatcaggaggcagcactttaccacagttaaccctacacaacgctgatgaagacagacaagaatgtggatagaagagaatttaaaagcacacatcccttttgaatgggtggagaaaagcaaaacctcattctatgagacctttaaagagagtgaaatgcctaagagggaaacaatttcaacagtaagaaatttgagcagaaatttggaactgtaacactatacttcaggattcgtttttaaagagtacataaacatcttttgcagctaaagggttgaaaggaagaaaggagtatctgttatcaaactagtcactcttgaagaggtaaatattgactctacagatactgaaatcctttctggaattgcctgcaggaaccagtacctgccacacaagaaaaggcatccttatctttgcagctacatcttagatattaactagaaatcctactccacttgtttttcttcatagccatctacaagattagattgtaaccggatttgcctttgatcatctcaaaggataaggattctctatgatagcagatgataagcaggggagtcttggtgctcatggatgtgcttttagtaaccaaaatatggaaagaagctgcaggcccttgggggctctaaaaagcagctgtgtactaactgatatggaagtattctaaccagcagtaaggtcacactatagggaaacgggtgaataacaaagcctcagagtcccttacatcaatgtaggttctgccaacaagaagcttccactgataagacatgtccacagcaactagacccgctgtccactatctagtcacaaccctcgaaggcaaccagaactgggcaggagcagcactgctagcacagcatctgcagttttacggtgcttgatcttgaagccaaaaatacggagtggccccttgatttttgctcttctagtccttccaccaattttatgcacacttcatttctctgtattaagtctttgtgactgaagtatctcagaaagtgacttctgttagttgtactaaacactatgtagaacacagtgttctatgtatttgattaaaaaatacataaacattctgaatgaacatagtacacatcaacaaagccctgggacctggcttgtttctgcttgcatttccccagttacctatttttacatcatttcagagtatgagtgataacatgaggttgaaaataaaacacacggttattcacttcgactaatgaggctttaagagttgtgactacaatacagaaatagaaacatacaaaaacccccaaagaaaatgctgggagtctgcactgtgagggcaaaagaagacaactgtatggaaatctaagaatccaaggataaaagcgtggccagtgtttcagagattgaagccatgttctccattacagtagccactagtcatgtgcagctactgatcacctgaaatatgcccagtgtggataagaaaataaattttaattttacttaattgtaatttaatatcagaatgtaacatgtcattgacaatgttgtattaattgtggaaatgttttggagtagattaaatcaaatatattaacattgatttcacctacttcttttgagtgtgactgcagaaactaaaattacgtatgtagtttaaataatatctttactgatcagcactcagatcacattagtagtgtcactatgcgagtgggggatccctcttcccacccaattaggatacagacgacatttaactgagattagagttggccaaggaacataatatttatcttatctgtaaaaagagaagatggataaattaccatagagaaaactgaaaataaaaatgctggttaaagaaccagatgtaaaactgaaaaggaaaaaaagaggatgcacatcgtaaatatgtatcgtcttggtggagttcaaatttttctttttgcttttgagatagggtctcgctctgttgcccaggctggagggcagtggcgcaaccatagcttattgcagccttgacctcctgggctggagaaatcctcctgcctcagctgagaccgcagacacatgccaccatgcccagctaatccttgtattttttgtagagatggggtttcgccatgttgcccaggctgatctcaaactcctgggctcaagggatccagtcacctcagcctcccaaagtgctgggattacaggcatgagttactgcacctgacctgaagtttccttttttcaatagcacaaggtgggaataacataatggagaataaagcacagaaggcaaaaaagggatcaattctgaatttatccattaatttacttaacaaatactatatgccagggcactggggatacaggttaatcaaaatctaaaattaggagagacagacaaacacagacatatgcatcactcagtagtaagtgaagaaaagaatgtgatggagaggataatgagtgagccaatggagccagccggcaagcttgcaataccaaaacaagaacaagaaagttgggatttgcagtaagcctaaaaacacgaagtggtgatggacgaagaggacaaggaggaagaagagctatattggtataaaaaacgaactaaataaggactaggagcagctcaggaagactgggaagggttcctataccctttggtacataacagcagctgaagtcttagctgaataagaggtgaatgcatgaaagaatgaacaaatgatttagcaagtaagtaagaaagttaagctttttgatgacagctttgcttctgtcctcctgacaaaatgaatctgggtgactgtaaagagaagtgactctcaaacttgagcatgcatgcgaatcaccccccaagtgtcccccgttctaacacattcccaggtgacactaatgctgctttggctgctctggggacttgttttttggggggtgggggtgcagagggacaaggtcttgctctgtcacccatgctagagtgcggtgacatgctcacaacagcctcagcctcctgggctcaagcagtcctcctaggctcaagccagcctcccgaatggctgggactacaagtgtgcaccaccatgccccactaatttttttcttttttttttatacatggggtcttgctttgttgccaagctggtctcaaactcctgggttcaagtaatcctcgcccatttcgacctcccaaagcactggaattacaggcgtgaaaaccgcacatggcctcatgtaccttttatcaataattttgcagaaaaaaaaagacacttgcctgcaaaatgtcacaaagttacaagaatcagccaacgtgacaaatagagacaaaaaagttaacaggttggaaaaaatgtgcatgtctaagaagcataaatgtaaagagatgtgtaatgttctccccaaccaccctctcaccctgcaaatcaattgcttaagtataaattaggggtaattttatgaagagattttacacatgaaaaatacctaggaatattaaacgattttatgtaagcaaaatgcaaaacagataaggctactctgataaggcatgactgagcaaaaagaaatcaaagtactgactccattgttccaggcccttatctaactaaatcttccaagaactccaagttttccaccattctgaggattgcaatgagtacctgaactagaagagaatcacattcatgttccagattcataaaatggggcccatacataaggaactgcctttatacaaattaaagggccataggctcccctctcccccgaccttgagacagagtctcgctctgtcatgaggctggagcgcagtggcacaatcttggctcactgcaacctccgcctcccaggttcaagcagtgctcctgcctcagcctcctgagtagctgggactataggcgttcgctaccacgctcagctaatttttgtaattttagtagagacggggtttcaccatgttggccagtacggtcttgatctcttgaccttgtgatacacctgtctcagcctcccaaagtgctaggattacagacgtgagccaccgcgcctggccaggaccatagattttactggcccttacgaaggcgcaagactgactttattctgcacgtgatcaactttttcaatgtgagtacttccattctgtatatatcagcccagaaaacatttacatttattaatagtcagacagcctacatggttaaataaacctgggctttttctttatctaacccccccgctggcgaccaatctccactgtactggctaccacatttcattttgaatgttttaagcccaatcatacagcctgcccaatccaggagggccaggtcagcaagatggaatatgacgccacagggcaacagagccattattataacattagccaagctaatgtactgccttttctctcccctaacaaagccctgccaccaattgttaaaattattatttttagtcaacgagaaataatgaaatggcatcccctccttcacacactcaaaccgtttttatttttccaaccccctcccccaccccgaccaacacaaacctttgttggggagaggaggttaaacagaggaaattgaatgaatggcccaaagagtcagtctatcccattagcatttgttctcctctattaatattcagtaggttgaacttaaattaaaccatgtctattgtctttcacaaaagcaataaatatgagctgaaaattgtaaatcattgcagtaaaggcagcttggttactgtgcctgcaacctcagctagtcaccatcagctgacgggagaagtgcgtctgggatccaagaccatttagccacaaggcagtgtccatttgtgcagccgagaactctaaagaaattgaacacaacagaaccctgccatcagcagctctgcacattcaggagcttttcaccgcatctcccaaattagcaagaaatgaaaagaccgcacaaaacaatacaacaaaacaggcttctgagtctggaacagcagcatcaaaatggaataggaattcctgttgttcttggtaactggagacactagtgtatggctatctccctcttgccttatatgatgggcgttgggaaaattgaaacacaaattaggccaaagattcctttagctgaaggaacttctaaagcaaccaatgagaacgacagatttcagaacacaaatgtatggacagaagacaactcttttctaatatctggaaaaaaaaagggactagagcatgtagtctgtatcattttatgatgttttagacacaaagaagttttaccagtcctctctcattagctacacatacatgacaatagaaaactaaaggaaaagccaatggctctattccacaaaagcagtgccccaaaacaagggttaaaaagaaaggaaaaacaaggagggctttgaggctgttccagggcttctaaaacatctggagcacaccaaagtcattagcatattagggtgactcaatgtatttagctttgttgtagaaaagatgcacaaaaggtaattctgtattatagagccaatgccgtctgtcaccctgtcactgtgagacaaggttatcacattacatatcaaacagtcaagcatccaaagacagctttcattttcagcagcaatttctgtgtgtgtgtgtgtgtgtgtgtgtgtgtgtgtgtgtgtgtgtgtgtgtgtgtgcactttaagatgatagaaaaattataaaagcagcccccatggctgaggtagggccctctctgaggtcatcagaatgcatggtttgctgccattgatagtgaaaaataaatgttatgttcactcaagttttgcaaagagaaaaaaaaatgaattgctttttaagcagggtaggcattccgatgccagggcagatttggctttgggcctgcttggcatggtcaatatgaacatggagtttgcccatcactgtacacatgcaggtcagcatgtgaagcttccaatggagcacagagctccagggagaggggcgagcagggcacagggtctgcagagcacagcccaggcttgtccactgacttgctcaccagatcaacacactggtgtgactgagaacaaatgccaagtcatgaggcaggatgtcggtggcacacttgtggtcaacgaggcacaaatgaaagtggtttcatacctcggcttatggaaaataattatccctttcccttatgagaccagcccctgagccgactagggctcccctttgtctactgtcaaatcagctatggagatttcccattccggtcaagaaaagacaatccaaaaacacccccacccatcactacttaaaacagtcccaagatttggaggcaggaatggggaggatgaataggtggacgcgggggacatatttttgttatatttaacccctgcaaaaacagatgtaaatactgatttgtaaatcaacaatctcacaagagctctctcaccaccaccagaatccgcccccacgacacaccttcaacaatctacacctcttttgcatgcacaattttttgagaaagcgttagatactaagacctgacacagtgttcattattaacatggaaaagttgggtcactgggtagataaggaaaatgtctgactctatcctttttttcctatttcagaaacaagtaaatgactctttgagaaagataggaccctgggccccagaaggcaataaacgccttgagctacaaaggaacaaacccagcagatatctcctatttcctcagaggaagaggtaagcagaacactgctactactagaatgggccccattctggctctctagaccccaaatgagtaagaaccaccaaaagacaaaagatctccccttcgtacatcctaaccaacaatcccagggggacagaaaacactgctcactgaaaggctccaacaaaaataaataaaaatagacaacaaggctgacagtttaactttattcaacacaaaacctctcacaaaaacaaagagccgtgatcttcatgaaagatttcccaaacagaccagaagctatttaaactctgatgatcaccactgtgaacataaatgtactgctcattttggcacaactccctgttacttctttggggcaagggctcatcctccccactctcttcccctcttcactccttcttcatccttaatatgacctttataacaatcagaacaagtacagtacctagaataataataatgactgaattataaacacccacgatgctctacaatcggcagttctagttttgtgtccaatcccatgactactctatcccaggccgtaactgctctgggtccacacttcatttcaacacccttttaattttacactgacaacccagtcaaacacacacccaccagacaacccagttataaatacgcaccaaaatataaatccctggaatcccctaggatatgcaactcgagcttctatcagctcatgaaaagaattccacaccacagagggcccagaactgaccacctccaaggtcaaaagccgcctacagaagaaaactgactcaaggcgacagtgggcttaggctgatgtgtaaccatgagcggcagaacaatggcatcactgcagagcaagggaactcagtcacatgaaggagacggaaacacaagggcatttttttttgagattttttctaagacagataaatgggcccaacatgtggaaagtcttgtgttcagataaactaacaggcccaaatttgatttctcatctcacagaatttgcacttctcaaagggagatgtccatgaacacagcatgttcacagatagctaatgatattcttctaccttcaagtaattacaagtgtgtatgtacttaggtctctaaagcttcctatcatctttaccccacaaatgtaaggtaccaaaagaaaccaggtatccaatttgagccaggctctccaaagataagcaaagctgctgctttaactcgatcgacaagtgccataaagttatcggtttgtgtactaatctgtaatgataaatgggcaaagctccacaaactttgtgtcctgactgacaccataatttgtagataaataaacagccacaccctttgccctgaaacctctctgggctgccttcattccctaggataaaaggaatctcttggaagttctaagttctgttttctttgtagcatgactaggagggacagtagttcccctgtttccttattacctcactcacatatcaagaaatcaactgccctcctacttttcaaatgaatatattcagagaggattaagtagtccattcaaagtaaaaaaaaaaaaaaaaaaaaaactgctgacaacaaataacttcagaaaggcctactgcctcccagagcagcattctttccactactgaaatataatgaatggaagcagtacagaaagcagcactataggaatgtggccatggaatctgctaagatttgaggcaccaaacattgaaggttcctgaaattcatctgtgtttacagacagtaatacagacatgaattaatgcacgaaattcgggagaagaatcaagagcactcgaagtttaaaggtctcaatccagaaccacttcaggtctcaggatctatttgcatgcctcagtttcctccatctttcaaggaaagatgatggaggaagaaaaagaaaggattaatggaaatgaaagcaaacatgctgtttatgaaggaaaccagagctatggtgaggatgaactaattaactttaatcaaacatttatttttaaatgctgggaaatgatcagataaattggtaataaaataaaagggaccagctatagctggatggcattcagtctccagagaaatgtctaaagtcatacaagcctgattgaaactgcagctttggccaaaatggtcaacagagcttaatgctttaagagcgacattaattctctcttgtaaatttccacagtgcctttgcaggagccaccattgcccctagggaggatatcaaagctaaaagaatattaatattaagcaaattgcaacactttttacatagtctctcatatatatatatatatatagcaccttgccatccacaatggatttaatcaggaccccagcagggaaacccacaaaggcctatttctccaacaaaagccataccagcctgaaacaaatctagagctatttggtttgtcttttatttataggaacagaccttctatcccaggttcctcaagataagccaccaaaaactgcacctgacagacccgtggagcagccatcctcagagccggatcattgcagagagacagagaggaagaaggacagagggagggagggaggaagagcgcagtgaggcaggctccggagcacttgtcaacaatcctcccctgtacgtaataagcaagcggcagtgcagattccgcgcggcaataggacggccagaacagcaatggggccgagggggaggggaggcagccaggagagaaggttatttatgtgcaagggagggaatcgaacaccaaagaggaggggtctccggctggctccccccaccctgataaattaaaatgagaaaaaggaaaagagtcactagcttttcatcctgccatttccccaacctgcaatgcagacaaatccgaagtatagaatttctgacatatggggggagggggacattcacagtttaattgtgcacacttttgtgtccccagccggtcagatgcccccaccccattgccaagcacaccccacccccacagacagcggactccagggcgcagtttcaatggcatccctttttaatatcataatctgtgtcattcagcacttgccttttatttatttttatttgtttttttggctgggaaacctgggcagctctccagacagactgcagaaatctctttccacatgctcctcctccagcccgccctcccccttactctgattccagcttccacggagcctcattacttatgaagtgaccgcatgggccaccgctgcccccaccaacaacagaggggcacccctccccctgccctgcgcaggcccctccccgaggcacataaattgatctaatctaatcaaacagaagctgttttctctcattgtttcttgaggatctttcacagaactggctctgtggtctggcagctgctgggaggggtgaaaaaggcaggagtccaactgagggctggccagctccctggcctcagacaactggagtacacatctcctttcatatgttatagctttttgatttttaaagtcaattttcttgaagcctttctttgaacttcaaccagcaatgataatgtccaaaacacatgctctcaacactaccacatgcttctcttcatgcccttccaatgggaggaagatggtggccaagtccacatggcactggaagttttcctcagatgcatccagaggaaatggaaacatgccttactaatactttcagtttcttctttcctagttgtggaaccatctaacgaggaccttctgggttctaatacttcacacacagtaacttatttatacctcacaaaaaccctgaaggtagatgtcaactttgctcaggagtgaagtcacccaggctagcgggtattctctccacaatggccaactcttgtttcctaaataattaaagctcatgaacatgccacaacttcttacatcaaaaatatataaacataaatatatatatacatgtacataaacacacacacacacacagacatcacgaaggtagatgatggtcctccttagtgtctagttgatatccaccactttaaaatcataattatacatagggcctcagagatactctactacaattcccccacttcatagatgatgaaactgtggctaaaaacaagtttgtctcttagcaaaggtcacagaggtagctcctatgtctcaacagacaggaggctatccgagaacccagtggcactggggaagaaggggtggggtaacctcaatatacaattccctacagaacatagaaggctggagaagaggtgctctccaatggctgccagggtgagcccccagagcagacccttatttagtgctctacagtgcagcacgttcctgttaacagtgaacaagtgtttggaatgcaccccactacagcgtaagtcatacagagtcaattaaaggacattcgggggatgactatttggcctttttcctcttccttctactgggacatgtcttttggctgcttcaatgatcaacagcacccaaagcagagaattggaaaggagacctgaggcagatattctgattatgctaattctcagcaaggttggtaagaaaagtagaaacgccgagacataaacagttggccagaaatgaagtttcagaatcacgtatgattagtggttttcctgaacacccccagttctgtcactcaaacactcagagtgcacacaggcatcagcactaataaaacactatctgcccctttcctatctccactgcttcctcctattctagtcaattaaagagaaacgggtatttaaattttaagaaataagaaaagcctgaccatcgtcattacttcctgatcatgcaggcaatatttcctaaaacacagtacatgcgagtcagtcctgtgtctgtcaggccaggaaggagacttaacaaaactctccgttgtaaatagccataagttttagactgtttacatgaaatgttggtcccctactaaagaagaaacatgcaaactaccctattagactcacagcatcctctggaagaccaagaataacactaagaaatggattcaatttaggaataacaacacaacttacaatatttaaagacaagaaagagcagagggcggaaagactggggaagaacttttctttgctccatccatgttcattaataggctgaaggcaccaccatctaagtttcaacagtgaaatatcagagcaagtcataaatcttaaaccaaagtcctctgaataatcaatccactttaatttttaaggatataaagaatatctgtgaacccgctgccaaaccaaactactcaaacataacctaaagccttgcctatgtgctaactttttaatattataacataaacatatataaatagcattttgtttcactgcatttgattataaactttacaaaacaggttccaatgggaattgggttttttccaactcaacatcaagttactaagatccatccgtggccttgcttattatatcgcttgcctatccattttcattattacacaatggagtatttataatactacacaactgatgaatggtaggtattccaccatgattctcatgtccaagggcatctaaggcgcttctagtttattgctatcatgaaccatgttgcaattcctctctgcaagtctcctggaaatcatgcactagagtttctcttagataatatttgggactggaagtggtagatatccttggatatgcaaatgttcaaatttacaagttgaatggcaaatcagtttccaaagcaggtgtcaacttttgattttgcaccagtaatgttaccactggaatctcaaaatgtttaaagaccttctataacatgtcacaagagagaccaaggaactctactaactctaattcaggagaagtcagaattttcagatgggatctcatattcacagtaattctatgcagacacccaggttcatggctgccatccacctaattatcacctcaaccccaagaccaaccccagttggtgccttggtatttcagtaccacgctattaataatttccccaaaactactaatcgcaaaggaggggtagggtggtgtggattgtcgtatgatagaagagagtacaaggttatggtgccagagaatttcacataatacagaattgtaatgatcatacagcatcagccatgtatttgtaatgatatttctgtgttatatggatgaaattacgtagtattgaccatatcacatagggtgtgataaaaattaatgcagaaaggggatctactgtgctaatatttgactttcaaaaacatcattaaagtgtgggcactctgtgacagcagtatagtaataataaatgttacctgttggaattttatttaaataaaagttaatacactggcactataccaaccagaattaggtacacacacagtctggcttgaatgctttccaagaaggcttggtaattcctgaaacaccaacagtgctgaactttgtaatgcatgtggctggcccgatagctaacatgtcaacaaggccacactgtacaattataaaataataccaataattacaagaacatagtagggtgacccggactgggtgatggtatgcaaactcgtgaaactaactgggttgttaaggctacaattaaagtagttgttccaattcagaagctatcaaaaaagacaacactgtagccctccttatccggattttagatttccaaggtttcagtcagccatggtcaaccaaggtctgagaatattaaatttaaaaatccccaaaataaacaattcataacttttaaattgcacaccattttgtgtagcatgctgaaaccttgaactatcctgcccaggacgtgaatgctctgcactgtacagtatttatgtataagcaaaaaacacagtatatacagggtttggtaatagcgacagtttcaggcatacacggagggtattgaaatgtatcacccatggatatgggcggactactgtattctacatgaattttttaaattaaaaaatactgacttatttgataaacaccttgcactaaaaaccttagtggatcatagtacacatagctatgattaagaatgattaagaaaaatcataagacttctgcctcagtttcctcacctgttaaacggaaataaggacaacactggtgttggaggcattaattacacaagtaaaagggtttgtgctacactgtaaacatacagggctacctacatgtattcatggtaataaaacactcaaattttggttcaatatatattgttggctttttggctggaaaaagaaacacataataaaatgtacttaacatatttgaaggtgatccggttaatgaattttaaaaggtgaacacagaaataatgccaagtcaaacaacatgatcaacctttttcagaatattttgaaaacattactcaatagtataaagtaaaattgaaccagaatcacaaaaaagctgtttacctacttaggaatagtgaagaaaggaaaactgtatattaaaagcactgaggccacctgcggtggctcaagcctgtaatcccagcacttagggaggccaaggcgggcaggtcacaaggtcaggagattaagaccatcctggccaacatgatgaaaccctgtctctactaaagtacaacaaattagccaggcatggtggtgcacacctgtagtcccagctactcgggaggctgaggcaggggaagcacttgcacccaagagacaaacactgcagtgagctgagatctcgccactgcactccagcctggtgacagagctgggagcggtggctcatgcctgtaatcacagcactttgggaggccgatgtgggcagattacctgaggtcaggagttcgagaccagtctgaccaacacgaagaaatcccatctctactaaaaacacaaaattaggccaagcatggtggctcacacctgtaatcccagcactttgagaggctgaggcaggtggatcacaaggtcaggagatcgagaccatcctggctaacacgatgaaatcccatctctgctaaaaatacaaaaacttagccgggcacagtggtgcacgcctgtagtcccaactactcaggactcccggaggttgcggtgagctgagatcataccactgcactccagcctgggcgacaagagcaaaaactccgtgcccccaccaccccccaaaaaagcattgaaacaaagggctgataggtcaaaactgaagagtgagtaatcaccttttcgaatttctgactctgacaaaagtagtactctcatatgctgctagtgtgattaactgataaaatctttcaaaagagcaacctggaaatggaggttaacaaatctgtaatccagtaatttctagaaattaatactaacaaaccaataacagaagcaacgatttgcttctaataattagtttgttggttaatacaacaaattaatgacagaagcaaaaatttctatgtagcttgttttaattattttgtcgcttctttgactggtttaaattctatgtccatttccaaaaaaaaaaaaaaaggaattattctacgtcggtttcctgggccatgcaatagaccgattagcaatgctttggttctgaattactgcatgaagccgctggggtagctgggttgagtcctgcatgtgtggcagctgacacattctctccactacttgacccttggagctttgaggcctttgcacatgctgttcccttttctgactattctctcctctgcctagagagcacctgctcctctttccatttgacaggtgttattccagtacaatttcaaaacatacaaaggtaacatttaccaaactgtcaggtttcttcaagaagaagatttagtcttgttcatcttttgttttgctttgagacagggtcttgctctgtgtcccacgctgcagtcaagtagcgcaatctaggttcactacagcgtcgaccttccgggctcaaccaatcctcccacctcaacctcccaagtagctgtactacaggtaggcgccaccacacccagctaattttttatattttttgtgaagatggtgtttcgccaagctgcccaggcctgaagcgatcctcccgaggcaccccagccgcacaaagtgctgggattatgagcatgagccactgcattcgccttgctcatctcaataaccctccaatgctgcattgcatttatgctgtcaaagagtaagctgtgtctcaaggccaatccagggctgcgtaagcctgaggtgctcttatctgggaagtcccaccctacatacaaagcacctaacattcaacattctctgggaaaggcaaatgtgtcaaagaactctctttatgtttgaaattattagactagacatagctcatatactttacaataaattatgagatctcagcactcactgattaaaatgagaaattcctcggaagtagaagacctcatcttcagattttcagatgaaatataatttcacgagcactgaatttaacaagcagaaatctagacatacgatgttttctagatacttgggcctttattaattacaattttacagtttttgtttttttgtttggaggctgattttgtttctgtaactaaagcagttttgcgtctttctcaaaatatgtgccttttatatcctgctaacgtaacctcattctgttactaaacatttaaataaatgtcaaaactacctagaatcctcctcctcttatttacgcagtgaaatcatccaagtcccaatataccagtaatcactgttaacaatttcgtgtatattcttcctggcattttccttaaaagcttcatacatcatggagaagaccagaaataacccaagtgctgcaacgataaatatggaacatcatttatggtattctctccagtggcaatcttttacagttttctgaaatcttgaatttttccacaattcagatgactttctttagtaatatggtgaaaggcaattttaaaatttacatggtatcacagggaaactggctgtgtcaacagcacagaagtagagtcaatcacaagagaattactcaatgatggaaatgagatggagctaccaacattatttacgtggagctaagggaaaacctacataaggtaaatgacaaaggtagacaaagataattttgaactcagcaataaattgctaggctgtagtttattatcttctcattatagtggcacagataccatgggcaaacatattctaacattgcccaaaagactaaaaggcatttgagtaaaatatcaatttttttaactttgtcagaattgtctacataacacaccatgaggatagctgaaagaatacccagaaagacttcctgccaaaagcaagaacagagcatagggatacacaggaagaatttcaccaccatttcatgcgtatcctgcctctatggctgcactgatagcctctatccacgcatggctttttaattttacattaactaaatcaaacacaaaattcagtctcttggccaggcatggtggctcacgcctacaatcccagcactttgggaggcagaggttggcagatcacttgaggtcaggagttcgagaccagtctggccaacatggtgaaaccccatctctactaaaaatacaaaaattagccagtcatgatggtgggcgcctgtaacccccgctacctgggaggatgaggcatgagaattacttgaacctgggaggtggaggttacaatgagcgaagaccgcaccactacactccagcagcctgggcaacaaagcgaaaccctgactcaaaaaaaaaaaaaaaaaaagtctcttaatcacaacagcaaagctccaaaagttcaagcatcacaggtagctagtggctactatataggacagcacagacacagaacgtttccaacatcacacacagttctaatgggtagcaatgacctatactgctgaccatgctgaccaacatgtctgcagcagtccctcatccctctgtcgtcccctgttacaagcttagaaccccctcctcaccacctcccccataaacagggcaagtcggacagaaggtgaatccttttcagggggcaaatgcagcagcaggctgacaaatcaccttaaatttagcagcagatggctcgaggtggtaatcagtctagcttgtaggggaggggagaaggggaaatagagattggaactgttaaagagccccaggcttattcagaaaactaaaaactgtaaggaaaacttcgtatacaaacgaatatcccaaagggtgatttttattagaaatggttttaggccaccttaacgtggcttgacagtaaaggaaggacagcaatcatcaactaatactctggacaaagtggcactaaaacctaggccaagttggactcacattttgccacctccagacacgcacacacacacacacacacacacacacacacacacacaccactctgggatcactgcactggtgccttcacacaccaaaggacagggtcagtagccatgaagggcacatttcctccagaatacttctcattcgcttccctccacattctgcaaaagcatccaaatgcttccctgacccaaaagcatgatagagccaccaaagtgggagagcaggagcatgccttcaacaccccaaagccactcaccactgaaacaaaaccaaatgagacaaagagatctagtgttttgttttacataaggaggatgccagtgaaggcatgccttgctcctagacacccagttactggtagaacaagaattacgatccaatgtcagtgcccattccaacatatcaaatttttgatgcattcaatattgcttgagatggctacagtccaggaattctggtttaatatgatttgacagattgcaaagtgaatggttgcataacacagcctttatcatttctaaaaagctgcctaaaatagataggccttaagaattttcttttgttgaccctaacttagagcttgttcccatcggatgctctcccacagtcactttctcccctctgtctgtctcaggcctccccactgacccagctggcacagatctagcctccattacatgccacatgctggctctgaaactctctgctagggctcctcagagacttcagaacccaatagtctgtggggtacccctcctatacaaacctaacaccgactacgcctacagggcagctttcaccaacaccactgaggatgccttgctggggaaaactagagaggcaatccttccttccatgcttgtcagggccgcagcagtctcagctcgccaagccctagggtgaggcctgattacaagacattggcattcagaacctagaagggggcaaaccaacttgaaaaccgtcccttaggtgtcctgcttcatgacaaagctacagcacaaataggaagtcacggggtactgtatatctacaacctcaataatgatcgcccttttaaatgtttacattcttccaggcactaagaacctgaaataaatcaactgcattcatcgtaagaataccacctctgaggaaaaaaaattagtatcccattttctgagacggaaaacaacaaaccaaacagatggtggtatcaagtttgtcggttttctgaacccttggtgggaccctgggacatacttacagggatgacagtgtgatccttcaacaatttccactagcagagctggaggactgcggcctactggacctgagctggcaggagggtagatgcccagccattctctccaggaaatctctgatggtctgtattcatggatccaaggacaacccagtcttccttcagttttacagagcacacatgagaaggcccagcttgcgttcccagagatgacctgagctctgtcaacaactgcctacccccacaaaaggacaggcaatcccttgcacagagtttctcacagaggggctaagaaatcggccagcagggatgtcaacatccactaccaagaacagccacttgatggcaatcttaacctattcccttggaattcgtccataaagggagaccccagaaggctagaagcaccaagcatgggctgcacaacgtggacagagctaagaaggacgtccctgcttgacctgagtgtgcggcagtgcggcgatgaacggatagagaaccccacaccaacaagcactgttgggttcttctccatatctaggcttctctggggactaggcagaagtggctataggctctgcagtcagacagctcaggagcatggaaacctctcgagctccatggcgcactcacattgggtttctcatcagactgaaatgcaagtggacagatgacaacaaatatgagaataaatcaaaggcaagttcctcctccttactgtggaaacttgttctctgaaacagggaagggcaggaggcagggggtgaaaaaagtggactttccttagaaggtgggacacctgttgaataaagcactcaagcaccgccctcctcatttaagttgtcaaagaaggaaactaaaagccatgtgcatctctaggaaaaaagtctctccagttaaaaatagaaatacactgtaaattgctgcactacacacttctatttttggtagcaggaagatgaactgaagggctctctgaaacatcaaaacatcaaagggtgggagggggtccataccatcatattaccataaaatagtccactgtcttagctaggataatgacacgtttccacagagggttcgacctcactttgtgtggtagtttcccaactcctggcttctccatttataaaaagagttcaggcagagtgaagagtttgccaacattttcctcagagggattcagaaagtgccagctgagagccttccagctcaccctttaaaactctgtaacactttccaactgagcaaactggaaggccctttcaaatgacactaggaacaaagtcatctcatggagggtacactgctgggggagcccctagggaacagatcactctagatgcattcttctaaattcactctcaaaggaggcaagatgctatttttcaaataagcattcaaaagcatgggtcccttggtgaaaaccccaatcacatgggatggaagcagactatcaaaaataacagtgttccagcctgggcaatacagtgacaccccatctctaccaaaacatttaaaaatcatccaggcggtgacacgtgcctatagtcccatccactcaggcggctgaggtgggagggttgctgggggcggtgcacgcaagctgcagtgagctgagatcgtgtcactgcactacagcctgggcaacagaaaaaataaaaacaaacagttaaataaattgattaaatataaaagacagttaaatgattgcaaaatggagaccttggactgccttcatgtaacacatggcagcataactttgagagccatggaaagctaaaagcagactaccacttcagagaccaccagaagctagcctgggagcctccacacgtggccttccccgtcaccaagatggcagtaccaagcatgaacaggcacccacctaactgcagaaagaaaacagggactcagttaaggattacccagatgacaagggcagggcagatcacacaggaagacaacctttctgtgtatacacagaaagagctgaaccagccattagctccaaagcataaatgaagcaagaacactagtaacaggtcagggagagaagctacggggtctgaaagcatgcggggcataagttaccatgaaacacaagagacagctctccttggatgtcaatggcagggtacaggtttggccttgccggtttataatcaagaatgggatgtcactggcgaatataaaatattataaaatatttatatattttatattatagtttgttgtagaaaaattatatatatatattttataatatattataaaatagctcatgtttctctcctcatccccacacctccttgaacgatagacttgtactgtttttatcatccttgggaaagaaattatgaagaagctaaatctgggactctacagaaacattttaaagcctatagaggaagctaaaaggatagatgagatttggcagcaggtgagcttaaaaatcaaattgtaaattaagggatttatgaactgtagggtaatttcccagaagcatatctagtaatcactcttctggcttttaaagatataccatacaggactctaaacatttaaagtggctcaagtaataacaggttatttccaaaagctaagtaaagggccctctaaatttgagggaaatcagatctaagacattcacaagcacagcaaaactaccctagtccattacaataaatctgatagtaattaaagctacttaaatacacatatcacagaattcgaagatttagaaaacacatgaagcctttctctagcagggaacaatatcactctataagaaagaacgtcaataaatcctattcacaaacaagtcacctctggctgtaggaagccctatctggtgaccctgcagggtctttctattctattacacgtcaagaataaaaaatggctgggagtcacaaaaggtagataagatgaattactgttaaacagataggattccctcgacctcagaagtcctcaaataattccacaatgcttccccaaataatctatgacaacagaaacatcctcccaggaccatcacaactgccatccccctgtcaaaagcagttactccatccaggcttctcaaaggtcaaacagctctaagggtttcctgacttaccaggaaaatgttctagtatcacacaagcaagaaagaaaacatgctgcagattaacatggagtttaatttaatctacagttagactggaataaaattgtcaccatgtccaaggcctgcagagactgtaatgtactccccacaaagtcttctgttgaagctctaacccctaaggtccatgagaaggtgatcgagggtaaataaggtcataggggcacagggctctgacctgagagggctggagtcctcgcatgaggaggaagactcagaggaaccagccaagaagagggcactcaacaggaacccagctggcctgcaccttgatcttggacttacagacaccagaactgtgagaaatggaaatttctattatatcagcagcccagtctaaggtaatttattatggcagcctgagctgactaatatacagactttcaccacagccgcaagaatatgattagcaatcctatcccaccacaggcacacgcacactgtcttggcatcctcaagggcgacaaggagatcatgggctcctcacaggattcagtctaactaaagacaccgcactagcaaaagacatgacctacagatgtctctatagagtgcctctggggaaaaaagccaagtctgggaccctagctccagaatttttaattattaacattaatacacacccaggctgagtattccgaatactcacagattaaaaacagtggtggctaatgtgctatacgagaaaggtgacactgaagacagtcagaatgaagcctcctccaaagcccatctgctctgagtttacacaacagttcagaacaaaaaccatgatgccagtttaagagacagtctgactctgagaatgtcatcatctttccaatcgcagggttcttattccaacactgtgcctacataagccacttctggagctgctaaggggatgcacatgggcctctggccttgaggcactttcagtccccaacactctcagacattcggcacattctggacaaacatcataaacccatcgataagcataacagctcttaaaaatacaggcagtggtgttgaggaactccacaatgagcaaatacatttaaagaactcaaccggccaggcgaagtggctcacgcctgtaatgccagtaggaggggggatcacctgaggccagatcttgaggttataacgccctccagcctgggtggcagaccaagactctgtctctaaacaaacaaacaaacaaacatgtcaactgtactgaagggagaaggaggaaccttttcagcgtgataggaaggtattttatctacactggagtgttgctcacttggttatatgtgtacacttgtcacaacaagacatactggagatatgtggtttcacaggctttccttagtttaaacacacacatacacacacacccacacagaagtagagagagggagagagagggggaaaggaagggggagaagaacagggagagggagaggggtgggggagagggagagatagctatctggagtcagaagacctgggctcaaaccctgatttgaccacttctctgctaggtggccttgtacaagctgcttaacacctaaggcccattaaattaaccccaaaaatattagtaaaagtacaaaaatcatcaattgagaattaagagacataatttttttactttttcttaaaagcccaattgtaatttaaaccaccaagcaacataccttgtacctaaacagggatgcgatgaatgtggttcagaaagaaaggacacaaggctgaccctattccaagaatctctatgatagtgagacatatcacacaattatgaatgcacattccctctggcaatggggaaaataagatgagctgacatctgggggcctagggtgtcacggtgtgagcatttctaaaatgaaatctggagtcccagttggcagactctcagtcccctgaacagagagtggcacatccacagcatggcaacaagaggtgctggaaagggggcggcagagacgtgggtggcatgcaggtgggccactgagccgtctgcatgctcattcacacaacacagacttcggagatcccaggcacagggaaaagcagcagtcaacacaaatgaattttcctctcaaagcgcttacaatctaatgtggctagacacattagataattatctatataaataataaatatctataaaataatatctataaaaaactatatcttaaaaaatctattaaaaaatctatataaataaataaattagaataaacgcacgcacatgtccctccctcacagtactacaatgtcaggcagtgagaaatgctgtgcagacagacttcataaggtaaagcgctaaggagtaacagaggcaggtaccctttttactagaatgttcaaggaacattccagggtatgggggcacttaaaggggaacctgaaacatacagagagatcaagtcacatagataccagaagggagagaattctcaatagaaggatcagctagagctaaacagagtatgctttgtgtatttaaaataccaggaagagggacagagacaatgagaacagagtgatacgggggcccaatcaagtggccagccatgaggatatttcgctttcacattaagagcataggcagatatgccagaatcagaacagagcatagcacagcctcatttgcatttttaaaggtttatgctggctgctgccaggaggaatacaaaggcagaagctgagcgagcacagggaggctgcaacataacctaagctagaaagtatgacaacgtggaacaggagcagtagtacaagttcagaatcaaaaggtactgtgagtttcaaacaggttcactaaggactagtgaagtggctcacacctgtaattctaacactctgggaggccaaggcaggaaagaggatcacttaagcccggcagttcgagaccagcatgggcaacactgtgtctatttgctggacatgatggcacatgcctgaagtcccagcaacttgagttcggggggttggggcgggatgttaaatggggaaggagcccaggctgcagtgagatgtgatagcccccactgcactccagcctaggcaacatagcaagacactgtctctaaataaataaataaatagtaaaacaggttagctaaagctaaatgcaaaaatctgaaaaaagaagtaacagatgactccaaggttttggccaccaaaactagaacaaaggaactgccacttattgaaaaagggaagaaggggcaagcggacaacagaagcagatgagagacctcacagatagttggctttgggacatcttaacttcatgaggcctatccaaaaaaaaaaaaaaaaatcaaagtgggccaggcacagtggcttaaacttgactttcgaaggaacagctaagcccaggagttcaagatcaccctggacaacacagggagaccccatctctacaaataatttaaaaattagccgggcgtggtggcacccacctgtggtccaagctactcaggaggctaaggtatgagcctgagagtcgaggctgcaatgagctgtggtcgacccagtgcacttgggcctggcccacagaagaaaatcctatctctaaaaaataaaaataaaaaaataggttgggcacggtggctcacgcctataatcccagcactttgggaggcagaggcaagcagattacctggggtcaggagttcgagaccagcctgaccaacacggagaaactccatctctactaaaaatacaaaattagccgggcgtcttggcgcatgcctgtaatcccagctactcaggaggctgaggcaggagaattgcttgaacctgagaggcggagggtgcagtgagccaaggtcgtgccattgcactccagcctggacaagagcgaaactccatctcaaaaaataaaataataaaatcaaaatgcagcagtcaagcaggcaggtggtgttcaggagatgttcaatcacggtaaatgctgctaaatgggcaattacaccccagaataatggaaatgtggcttgggcaatcattactgaccttgataagtggcccaacgtgaggggtttaaaggtgaatggcaaaggaaggctgggggatattaatatgaatataaatagaagggcatggagacaaaccttttagacattttcttatgggggattttgctataaactaagagaaagatacagcaggcaggagatgcaagaacaagggaggctttactttattatgggaaaaataagaacatgtttctacaatggtgggaatgaaccagtaaagagaggtaaatgatgaaggagggataatttccagtgtgatgtcatggagggggagttattaatttcatccgcaaagaaactagagagacccttatagaaagagcttcagcttaaaaaaaaaaaaaaatcccaacctgggcatgatgatacatgccagtagtcccagtgtctcagaaggtgaggtgggaagactgcttaagcccaggggtttgaggccagcctgggcaacatgcaagaccctgtttcaaagaaaaaaaaaaaaattctagactacaacaaatttccatccatttgccttccccacttctttgaaactgaactcctataaaaactggcaaaagcaaataggctgtagcaaacaggcccaactagagctcagactgctctccctcccttctgtctccctacacagaccacctcctccgccctatagccctacacatacagactccactacccaggtgacactacctgagtgctgtgtccctcctaaagtcgtccaggattggatgggaatgatgatgtaatcagggaaacagagcccagctcacagaactgacaaaggaggcgggcagagagaaagagaggggcagtgggtgtcaagcacaaagtgacccgaaagaggagcacattaacctcctcaggcacctccattcttaacgctccaggaaatgcgtgcaagcagccatgcctactaggaagcgtggcgcctcactgtcacttaaattggatttctggttccaatcaggcttcagcatgatccattccttccagttaagtttctcatcaaggctcaaaattcctcatctgtaaaatgatgagtttgacctatatacctctaaaaagactcttcctgctctagcagtccttaattttgcacaccactcctttggcatcagaccagtacaagtgacttggccacggaaaccggccattgcagccatttgtcccactagattatgacaccaacagaccagtcaaatatttgctgacccctgccaccccaaggtcttgctcagaaatctctcgcatctttcaagacccctttgcaaggctcatggatatacaacgtttcctgtatcttaggactgggtctctgacatcatctgcctccctgctagcctcctgcactcacccatacactcgtttggggtttttggttctgttttttgagaaagtctcactctgttgcctaggctggagtgcagtggtgcgatcttggctcaccacaacctctgcctcctgggttccagcaattctcctgcttcaacctcctgagtagctgggagtacaggcgtgcgccaccatgactggctaatttttgtatttttagtggagacggggtttcactatgttggccaggctcatgatccgcccgcctcggcctcccaaagtgctgggattacaggcgtgagccacagtacccagccccatttggttgttaaagcatttatcctacagtattttatcctgcttcacagattttaagttgcatctatttttctcatgttaaaacatgcatctcataattaagctgtcccacattcatcattggaagcactgttttgttcttgcttactgatacataacataatggtgcatcactcaatgacatcttagaagggatgaaataaggtattaggacttgaccaaagtaagcaacttgatctcagtttttatacccacaatgcctcccacataataaaaactccaacacttacaaaatgaaaatctgagaaatgccccacctacatcactacatcaaaaaagcagctgaaagacaaagagcccaagccttctcgcctttccacaacaaatgtagcttcctttgtaaacaaaaaataagttgttttcaacaacattgaagcccttcatttcacccagctttctttcatgcagagtgtgtcctcacatcaggggaaacaggagagggaaagaaaaaagtctggaggccaggacacaggagtgttagagaaaactcaagctgcaactggtctccctacagcttgcagaggaggagactagcacacagacatcaacacttcggtaaagctgaagcataagccacttttttttttttttttttttttgagacaggagtctccctctgtcgccccagctggattgcagtggcacgatctggctcactgcaagctccgcatcccaggttcacgccattctcctgcctcagcctacaggcacccgccaccacgcccggctaattttttttttttgtatttttagtagagacagggtttcaccatgttagccaggatggtctcaatctcctgacctcgtgatccacccgcctcggccccccaaagtgctgggattacaggtgtgagccaccgcgcccggcccataagccactgtcttcagaagaaaataataataataaataataataaatgataatgataaagtaggcaccatctctagtacagctagacctgaaagtttccagcaaaaacagaagggacaggtgttccccttcgtagaggaaggtcactttataccccagacattcatttcaaatatggcccacaaataaacttacgtaaatcagaccatgtgacctgacatttttttattttgattcacaaatacgtttttatgacttgtgtgaacatattttgttaacaatgaattcacagtcgggcccacatttcattccacacacatcaagaatctttggaaatgactgaaagattctgaaaggagttcaaaattatatttcttaaagggggcttggggggtgttggctacacaatgtcccacatctgcgcttccaatactggtccttggctacaaattggcagctgttgccaaaacatccatgcaccatccgtccagtgagttccagccagccagaacgacaacagcattaaaaacacaaaactctaagtgaggaaatggaaactaacggatgcatctgtgtgtctgactgaagagaggaggaaaccaattcacagtctacatttttgataccctctatcaattcaattacaaatcataaataaagcccagaaacacagtcaataaatacttaccatgccttccaaggttctttttcccaataaaaaattcacttactgacggccaggcacggtggctcacgcttgtaatctcagcacttggggaagccgacgtgggcagatcacctcaggtcaggagtttgagaccagcctggccaacatggtgaaaccctctctctactaaaatataaaagttagccaggcatggtggcacatgcctgtaatcccagctactcgggagactgaggtgggagaatcacttgaacccaggaggctgaggttgcagtgggcagagattgcgccattacactccagcctgggcaacagagcaagcaagactccatcccctcacccccggcccccgaccaaaaaaaaaaaaaatccacttacctccttccaaataaatacctacttaaaaaaagtaaagtcttcctacaaattcttatttttggaatgctatctttatgaaaggctccaaaattacctctccttatctaagtggtggctacaagcttgggagctctaatccagaaagcatgggaggtctgatccaaaaggcctggtcttatatcctcatgcttccacttaatagctgggtaggcaaattgctaatccactcttagtatatagtttcctcacctataaaattgcttgttctgaagattaaatgagttaaatacagctaaagtactagaacaataactggcaaatagtgagaactcaaggtaggctagccatcacaactactgcccggggtaagtttaaggaaatgaatccagggtcccttaaatctcatcaagagtgttttgctggccaaaggacttgatctaagatgacatttataggaagcaaatgaaattcaaatacagttaatagcttccctctctgactgtgtaattctgtgtactcattatttgtgtagcatgttattatttaaatgtccctaattttagcctcagcaggccaagggccctcaaagagtggccaaggtctcagcctctgccagtcctttccaaagcttttgtcaatttattacatccatgaaaagtggcattatctacaacaaaaagtagacagaaggctcacaatcagcaaatcttaccacttcacgcttaagcccagcaataaccaacaagctgtaacgatggcatcagttgctacacagacaactcatgaggctgttcaaaactcacatatcctaccaatagtagggccaaaaaaaaaaaaattcattccttgtcactgtaaaaccacaaaaacaagactgatagcaaacatggattttatgacatgaaaaacgacgtgtctccactatcttatgtctgcttaggttattactactcacagacctacagaaccagggcagctgagctcactgctcagatacaagctgcagtgtccacacactgttcccaggcatcagatacccgacccccttcacacagatgaagggcaaagggctgcttgttcatcacaccaggatgccaatgattcaggagatgtcacatgtattttattttcaaattagataaaaattctgtaaaatccattctgctgttatttttaaatattatggtaaaaacaaatgatttttcccaggaaagcctccaatcatccatttatattttccaataatcaaagatccagaaacaacgctggaaatgggaaaaaacaaaacatcttcttttcaatattcctattgcaaagatccaatgtagttttcatgcattctgtcttgcaaaaaagtactggattcaaagttacaggacttgagctgcaattccaattctgctactgtgaattaaatacctgtttgactttaagaaagtcactaccacatctaacagtcataaaggccccatagttagatgggtctttcagtttacagatctctgagagtctctgagtgccagggctctcagaggcatgtcactgtccccaacctcgaaggcatgaaagaggacacagaggcagaagctccaccaccacccacccttctctggggttaaggcacatgttctcatccttgcttgcacagcatatgtcacctcctagcaatggctctggactggacaatcttacaactctaccaccagacaaatttctgtgacaattaaaaattaatgaaccagtggaaacattttgacatttgaaaaggaatcttttgggttgggaactaaccaaaaaaaaaaaaaaaattaaaaattgagggccgggtggggtggctcacccctgtaatcccagcactttgggaggctgaggtgggcggatcacaaggtcaagggatggagaccttcctggtcaacatggtgaaaccccgcctctactaaaaatacacaaaaaaattagctgggtgtggtggcgcgtgtctgtaatcccagctactctgggggctgaggcaggacaatcacttgaacccggaggcagaggctgcagtgagcagagatagcgccactgtactccagccaggcaacagagggaaactccatctcaaagaaaaaaaaaaaagaagaagaaaaaaaattgaaaaaaaaacatacatcttgcatggacttatccatcctggctcgggacaggtggctcacacccataatcccagcactttgggaggccgaagcaggtagatcacaacgtcaggagtttcagaccagcatggccaacatggtgaaaccccatccctactaaagataaaaaaaaaaagtgccaccatgcctggctaatttattattattactataatttgtaaagacagggtctcaatttgttgcccaggtgtggtggtgcatgcctgtaatcgcagctacttgggaggctgagacaggataatcgcttgaacccgggaggtgggggttgcagtgagccaagatcatgccattacactccagcctgggtgacaggctcacaaaaaaccaccaccattatagtcaatccgctgtgatatggtttggctgtgtccccacccaaatctcaacttgaattgtatctcccagcattcccacatgttgtgggagggacccaggaggaggtaattgaatcatgggggctggcctttcccgtgctattcttgtgatagtgagtaagtctcacgaaatctcattttctcttgccactgccatataacaggtgcttttcacctccctccatgactctgaggcctccccaggcatgaggaactgtaagtccaattaaaccactttttcttcccagtctccaatatgcctttatcagcagtatgaaaacaaactaatacaccctgcttccactcccactaacctatcttctgatttcatttgacatttaggaagtgtttctatgagataggacatgagtgatggctgactataaagtatccactcaaactaaagggatttttcagcaaagcatgcatatacatacacgcatatatacacaaagacacacagacacgtccacatatatatgcacaacacagcttgcagttacaacaacccctactcctagcctcaccagccctaaagtcttggttgctccctactgtgtgagctttctctggatcatgctccgaaaacacctacagaagaggagctcttcccatgataccaattctgttttccagtgattccaagtagctccccaaaataagaaagtacactttgtttaagatggtagctgccttgaaaataatgattttttaaagagagagtctcgctctgttgcccaagctggaatacagtggtgtgaacatagctcaatgcagccttgacctcctgggttcaagtgatcctcctgtctcagcctcttgactagctgggaccagaggcatgtgccaccatgcctggctaatttattattattactattatttggaaagacagggttgtagtttgttgcccaagctggtctcgaactcctgggctccagcaatcctccctcctcggcctttcaaggtgctgggattacaggcatgaaccaccgcaccaagcaaaataatgattcttaaagcacactcaagtcctgaaacaaggagatctgtttactcagaactgctatagaaatcccacatacagaataacaaaaaggtaaccttggaacgctgccttcataaaaaccaacacaaactagaaaatggcatattcacagcaatttcacaacccaaagagaagccgaggtgtctctgtattttttaaaagacttaaaagtctttatctggatgaaaagcaaactaccatgacaaaaactaaccttcccttatgaaggtagtgccagaataaataaaaagacttcagtgatcccaatgtgggcatctttgccaactgagatttttctcctcagtatcatcaatcccttgactctgccagagctaaacctacatttggccaactggctgacagcactggttgcttctggaatgacaaactttagtttttgttcatttactcaaattctacctttattaaatcctgaacatctggctaacttcttgttctaaaagctggtgtttcccagttaagaaaatatgggtgtttttgtttccactgttggcaatgccaagaaacactaaggcattacaccattcctgaacagtacagtgagagcatcacaaccatacaatctaacagtacagcagtcactgctccactctaaactctaggattaagtgatattctccttcatacccaaccccccacatttaatcaagcaagatgctacgttcaacgtgaatcaatgacaataaacacgatctatatcacatcaaatgttctccaactacacacaaggtttttagtttactgtattacaagcaacgaatggctagggtccctctctgctggagacccacagaacaaggcagagtgccttttaggaaagcagctatgagggtctaaattggattctatggcaatagattccacaacttattttgttttctgcaaatgttaagactcaaaatgggcctttcccatacatgttggctgagatttgttgagagacgcacacatgactgagccactatggccttaatggttgacctccaaaggcaagtcacccataagaaagaaaacccgggagggtggacagaggctcttctttcaagtcacgcaacagtggaaggagacagcacaactagggtgaatggtgaagttcagagaggtcatctcaggaaactctgccattgccccatagaaacagagcagcaacaggtactgctgtgcactagtgcctgtgaacactagttccaacaggaggctgccagacaactcaccatacaactaaggtggtgggaaacaaattggaagccatggtgaacctgtcctttggcaccctaacaaactgtcaagtaccccatatgtggtgactctcctaagaccagagccatagctctcaaaaaagaacagaacctgctctttctcatctccttgccccaaggaagcataaacaaaaacatggtcaattcattcactttaactgtaatcctgataagtacacaggggattatagaatgtcactgcattcccctgaaataaaatagtaaactacaagcaaatgtttgtcctcagatactttctgttggatgacttcatctgcaccatatgaaccctgttcaaaacagacatgagaacaaactcatataggaacaagtttctttccaggcatcaaggagccaagtgataatcatccaggaagaagcacacttctagaggtatgcaaagctgtcccactgcaggaacctgcccagcaaggaaggaaggagagatgagaaagccgctgagccagagagcaggaaaagcagtagacagaaagatttaggctatttcctatacaacccggggacaagaactaaagactccacatttcagcaagatcatcaaagagttctgctcacataccagtgtggaaagacatacatatagaaaaaccagcaagacaggacctacagaacagactaatgtattttgtccactatataacgcggtacataaaggaacacaaaaacaaccctataaacccaacaggatgtctgcagtgcagattcacctagcctacagactgcctttaggtgcctagaccaggaagcacaagctgccagaatacatccaattcaggaacaagtccacgcccagagatattgtacattccaatgagatattccaagagtcaactcaccattcacagttttcaggctcccagcaatgccttccgcatgctgcctcttctgggaattcttgaactccttcagagacaaataaaggactttacgtaccacccgttcttctgaccacggaatcccatcactgtcatcctgaagaaacataagaaaagagaggagttactgaatagaaagcaaggcaatattcagagtcaaaataaactttattttaaaggaatttccgaacacgtactgtgtgaccacgacccagttctcaatgtcagaattacacccataaggtaaaggggcaatgacctttctgaacaggcctcaaagaaaagtgaatccacaggctgttaaaaagaatgaaagcaacacacaaccatctcacttctttatacgccccaaaatcaaatacgttcatcaactagtaatagttttatattcctgacaaagttcagaaaaaggtgttgttatacccacaaccagaaggataatggatcattttacttgagttttataaagtgagcaatgccagaatgtacactgcaacagaaatatgtacggagctcttaaaaatgttgctgcctcccttgggagctcaaaggatacagcagatatgggtgctgtgcattcaaggaatttacaatccagtcagaagacatggaattggatccgcattggccacttaagtaaaagaatcacaaataaaaggagagagtactgcagaaggaggcaactgatcttggcggcatacaactggcatgatttttgttttaatgtacacattaatgatggatcttgaaggtctcatttcaaactggcaacctcatgtctgttgctccagaacgaatacaagttcttaagaattaacaaaatgaatgcagagatgaccaaaaacaaacagccagcccagagactattccagcaattccagtcataaagatataaagaaagactcaaattttaaaagcactaaagagggaagaaaaaattatacagagacttgagacagagcaagaggtgggaagacagacatggttgacaacagtcactaaagcaaggtaaataggaagagatacatgtttaaagaatcagcaagattaagtcactatagtttttattaatagatgatgattcacatggccaaggatattgagaggttctcttctgtagctgttaatctaagaaggacttatgttcacacacctacatcagacttaattaagcattttataaaagttcattttagaaatggaagcaggcctggcatggtgcctcacgcctgtaatcccagcacttttgggggccaagatgggcagatcacgaggtcaggagttcaagactagcctgaataacatggtgaaatcccatctctactaaaaatacaaaaactagccaggcgtggtggcacgcgactgtaatcccagctattcaggaggctgaggcacgagaattgcttgaacctagagggaaaggtggcagtgagctgagatcgtgccacttcactccagcctgggagacagagtgagactcagtctcaaaaaaaaaaataaataaataaataagaaatggaagcatacagatactttgggccttaaaagaataagaagaacggcttggcgcagtggctcatgcctgtaatcccagcactttgagaggacaaggcggacggatcacaagggattgagaccaacctggccaacatgttgaaaccctgtctctactaaaaaactacaaaaattagctgagcgtggtggtgcacgcctgtagtcccagctactggggaggctgaggcatgagaatcacttgaacctggggaggcggaggttgcagtgagccaagatcacgccactgcactcccacctgggagacagagcaaaactctgtctaaaaataataataataataacattaatatcccaggtaaaatcatgatttggggtattttggatattcaggttccctttgttcaaggagaaggcagaaaatctcatgggcagtctggtgctgttttactggtttatacaaaagaattggtttttcctccctaacactgaaggatcacagaaaacttccatgggactcaatgagaagtctagatgatctgacgtctcctccagcacttacgttcctatactctgcataaatacaaacttcattttagaaatccaacatcatagagactctaagccctaaataacttaagctgcactttcgttaagcttcacagatttcctagaatgagagtaattctccatcttctacagcaagaggaagaaagtcctgagagaactaggatttccaccttctccttcacatccttcactcacagaagcctgccaggctgagatttccgactgctgggcagtgcctctagaagaaggaggtacatccagtcttcctgtccgctctcccaagacagccaaaacatccacagaccacggtacggggtcagggttcggacatgaaggctaagagaagccagcaaaccttgccccaacctaacaagagaaacacaatttctaacctgctactgcgtgtaggtcactggagaccttcccaatcaaatgattaaaaaccagaaaaatggaggaacccaaataccaacctgagtaaaatgcaactgacttgacaccacaacacatgaaaagcatgatatagctgaattaatctttacagcaactcccctgggtttgcaagaaagctctcctaatatactagctgcaactgaatgatagtgttaactgcaggaggagttaatgcttattaggctgaaatccacctcttcagcagcctcagtctattcataaaggctgtcagacagaattctcttcatcaccaccaggttcctattctcactgttcgaatctccacaacaaacaatgacgtgagattataaactattatttcctacatgtacacagtttataaattataaggccccaaaatagctttcaatgtaaaattcccatgacgatttattgcatcctgtgcaggctggtgccttcatcctgacttcaggctccagttgagagaattattcccctacaactaatgtctaattaaaacataaaccatgtgagatgaaaactacaagaaaggaagcgcatttaaggttcagttactgacacaagcagcttcattacacctatgaagtactttaaatacaggagaagcaaatccatgacccagattatggggtttcaaatgctacacattaaaattcaaacttaaaacacacacaacacacaagtgttttgtaatctacagtgctggttgagacttgtcacctgctccctcaatgctgatgcaagacacaaatctagtagatgagttgactcagtgctgttcacaagagatagaccagtaggtaataattccaaatagtcccaattaagctgcctttctcaactgtagggtcatggtgaatcatccttaccttataatcctctagcagaatcccagatgcagacagcaaaggtgtgcctgcactcaacctatccaagatgggggagaggaaggccagaagaaatatccttccagtttaatgctaactctgctgtggctatatcattcttcattcaggatcaaccagtactgaacgctctaaaaaacagcccagatatggccgggcgcggtggctcacacctgtaatcccagcactttgggagaccgaggcaggcagatcacaaggtcaggagatcgagaccatcctggctaacacggtgaaaccctgtctctactaaaagaaaatacaaaatattagccgggcgtggtggcgggcgcctgtagtaccagctactctggaggctgaggcaggagaatggcatgaacctgggaggcagagcttgcagtgatcgtgtgcagagatcgtgccactgcacactacagcctgggtgacagagcaagtctttaaaaaaaaaaaaaaaaaaaaaacagcccagatacaactctatcattagaggtcaagcaaactcaaaatacatacacccaatacagaccttcctttccattttctcaatagctgtcttatttaattaggcatttaaccacggggcaaggaaatcactactcttgttcaccactgtatcccagctcctaaaacatgcctgatatagcaagagctgaataaatacttctggaatcaattacaaactcaacgaagctcagtctcactgttcccactgacatttatttacccctactcgccctgccagtgtctaacatccagtgccagaagtcacactgctatcctcataaaacactccccacagagactaatcccaaggggctcagccacacctctgattctcagcagaggctggtgtcctaggggagacatccttcctccacagtggctgctaccactcgttcctcagccactttgcagtgttctctgtaagaaaaagtgccagtccagatgtccacatggtcttacacatgtaacaactctgtcacactcccatttgctaaatgttgaccaatgattccagctactcttcccctaccccacttacatctgttcagactctttctcctgtatttccagcaatctctcatgatgctcctgcccgaccctctagatccaataattcattctcaatcatatgttcaagtcaactaatagcccattagcacctcactgtctgaaaatccaaattatcccctttgtcctctgtaaaccacttcaggccccttggtagaatcagtcagggtttgacagtgcagacctcttcttggcccactctggaatggcccacaaaaccaagcaccccatgcattctggtttactggtcagcttaatatagaggacacaggaatacgccctttagaggagaagtgatggctccttttaaactgcaggattactgccacttttgaaaataatagaatttcttatcaaaaagagcaattggtcaggaatcaaacttgtatatggtcataattttttttacaaaatttactaaaattagtaaaaaacactgtgccaagtggttaaggtacaggtggtctgtgggccacaacttggcattgcaagttatctctaacccggactgtgagtctttttactaaaagacaaaaaggagaacagaaccactcactgttccaagttctataatacacacataaaataccagagctcagaaagtaagcacatgataacatcacatgccttttatcagacaacaccatgtaacaactctccacagctgacggtccgggctagagattcaacatatccttccatagtgttgcaactccaagacagaccacctgtaccttaaccactcggcagcctgttagaaaagcagaatcctgggtcccatccagatctaggggctcagaatctgcactgatgcccagatgattctggtacacggtcaagtttcagaagctctgctctgcaaaataggactccatcctgtgcctatatacatcagaaagaaaagatgaaacctccaagacgaatgcttcaaacatccatcccatgcggccagtattactgtcagaattcagatgtctatataaatataccctgagaaatcttcctttgactcctcttcagtgatcaaagagcacagcggaaaacacccaaaaaggtatggcactaagtaatgctagttcctttaatcattccttacgtgacacggtctctcaaacccttctcttttggttactcaacttgggatgacttctctttaaaacccaacaaccagaattaaatatacattcaaattacatgtgaataatcctccagaacagatccaacacatacaagaagataattctatttccatgcacagtctcatgacactgcaggatctcatgagtttgcagttaactatatcctccatggtgactgtttctttgcagggatggggaggaagtaagtaaaagtattgcatcaccatgaaacaagaaccaaatgaaggatccaatccaaccaaaagcacagctcccagtgatacaattttattttcctgtgatgctctcctctactcattttaaagacaaaaaaacaaaaaacatcaaaattaaaaccttgtacaggccactgacagaaagctatgtgtgcataatataaccaagttgtattcagaccaggttaatgaactgctttacaagacaaaaaggtacatgatccacacttttaaaaaccagattgttttgatatagtttctaactacaccaagagttcttataatttgtctcaaggttggttggatcacccaccaagaaaaagcctttacaggatggtgttctgcagtgacagccaactcttcaataatatgggccctcaaaaatctctgaaaaggactcaagtacattagtgcaagaaaacagagacatccaggtcagtaaagctcgcagaatgggtgccacccagaggatgatacttggagtcgactggaaagacttgaaaactccatcatgattgtactaacagcaaacctctcctggggaagcaggagttgggcagtgagctcagcaccacctgcatttaataatcatgatttctctgctcagccttcctttagtataaggtccacaccactgctttctccctttagagtcaaaggtatgggggaaacgaagtaatcgtgaaacttttagttatttctagagatgaattccagagtcttgacgcaaatgtggcattggtagtcagtccatggcagatatcagatcaggaagtaaaatttcaaaactcagaaatgtgttagtagccagagatgttaaatatgtaactcacactgactcctaggtaaaagcaaaattaaaattattggtttgcagaggcttcatgtaaacaatatatgaaaaaaaactattattagtagtggggatagaagtgggagtaggggaaggaattttctattactagcctacaattggcaaaccatcgttatgcaatttgttcataccttggtttttattatggtttcaaattcaggccatcttgatttgggagaaggaaacaaagatgaaaaagcatgggttaaaggaaaacacatttctgatcaattaaaaatcaattttctgacaattacatctatttaaaaatggaagacagttaatttcctatcacttgcaggcaaactaccttagacactcatgcttcacaggtagagtggtcaagtcatttattacccaaatcaagggcactggtagtaacgacagggaaatacctcgtggaaactgggtcatgggtcaaccaactctaccaggccccttccaggaaatctgaatcaattaaaaacaaaccaaaaaaagcctacaatgacacaaagactttttttttaaccatatctccaaaaagaaataaagccactacaataaatattataaaacaaatataacatagacatagcaggattgtaagtgtgacacacatctgttctaaagttggaattcagaccccccaccaatgttttaaataacaacctggtgataaagaggcagaaggtggcaacctaggtgcacttacggaaggtgctgcaaaaaaacaatcctgcttccactgggcaggggcacaggacatcaaaggctcttcacaacccctagtacctaaaaccaactgaaatgcagaaatcgccttcgaattgatggggccataggagaccaaggaaaggagcactcaggatcacaggcaggaagatctcctaacacagagcctctttattaaaattcacagaaatgctaagacatggcaattggagttgccaaccccaccccccaccccccccgccccccccgccccccacccacatatagagatcgctagagctctacaggtggagggatgtggctactttcaaaaagaaaaagaagtgcttttcctgactccaatgcccaaaggaccaacatgcaatgtcatatcatgggattaaggatggtggatctgaacaacagccgtacagagctgaatagcaaatgaaaaaaaacattctaaaaaactaggcccatggacaaggaaaggattgattgctatttcctcctcccaaggataaatgactggaatcctgtacatgaatgccttttattttcagaacgtgtttctcatatacctgctgttaaatcaccctacttgaaacaacttgtggctgcctgatatgccaaacctgttccagcaacactttgagagaaaaacgaaagcaccaaataaaaaattgggagggaatgttgattcttcccacagattaagtgtaaacaaaaatggggttgggggtgatgaaggaaaatgagaaaggtacaacttcaactttgtctaaaataaccttttcttcccttttaacaaagtaacagtagtactaataatttccaattgatttaattccaaaaaaaaaaagtagtctgtcaatattcaaataaagtgaagcctgagtaacattcacaactggaaataaggggccaggaaacatcttgagagaagaaacttacttactgaacttgtgaatgatgttcccttgcctagggtttaaattaaaagcacttcaaagcagcaaatttcttcagacagacatgcttcccaggttagggtaaacggcctgaaaatgcttctgcaaggagagttttacttcttccaaactcccattaaataatgtgtacttatctttgattactgcctatttaaaaaaaaaaaaagctgcagctgaaattggattaagaacttctgctgaaaacgatttattgcataacacaactctgacaggctgaatctccggccaccaactgagcctttataaaaatctgctgggcagctgccaagtcagctcttttgcgtctgagcatgtcagacatccgccgtcgtcaaggcagcagcatggcagcaagacgtccgcacgctcatggttaaagggtgcagtcagggaacagagcagccagaaccacgcaacacggcattaaaacctcctgcagtgctggatctgacggttcgctttttcaatgtaatcaaaaaagacccaagatctacagcaggattatcttccagcatctaacagacacctggattgtcaatgtaccttcactgatggagtggtggcgaggaaatcaaattacaaataaattattggccagtgtcttcaaaaatcaaatcaaataaatagttcaatatcaccaatgccagtgtgcaactatatatgacttcactttgggaatttatgttactagaatttccttgggaatttatgttaatttatttacaaagaaattctaatatttggatcttttaatcactaatgcctttttatgttcattatgatatacccccaaaaaatccccaaatgccacattctaatctgcaccgtctaatacagtagccactagtcacatgtaagtacttataattaactcaattaaaatttaaaattaaggtccttgagtcatgctggtcacatttcagttactcaatggccacaatccgaccacctgtcaatggacaacacagctacagaacggttctgtcatcacaagaagttcttttggacagcactgacatatctgcattaaattggatagggtttcaattgacattgcgtgttacgtgatagtgcattttactacgtccctgagagtcttatgtgccttatgtgttactccatttaccaagaaaactgtgggagataagaaatcttttacaagaaaattagagtctaaagcaggcaagaactattcaaagtgcagacatccactcatacaactctccaggttggaagtggttccagtcctgtggggcacatctggcctctaggggttttgcaggaaacccctcttgcaggaaacatcctgaagatgaagtaaagtctgtctgcaaagccttgaagacacactgctttcctacaccttcaaatccttttctaaggaaatcactacaaaataaagcctccgggattgaggccagacaaaaaccagtcctatccaccagccagtctccaagtacccacagggtggccaaaacaggcttgatttgattcatggttgccccttactgacagggctggttagaattacggccctgtgggtgatggaaaggagttagtgctgctgtttcttccaccaggacccaggacactgctgggggatcattttatgagatcaatcaatgcctgactgactcgctggcttttttggttgaacaataactaccccacccgaaccccagcaaggaaataaacagaagtatacgtatattgtcacaagactggttatctctggtcatgttatattacaaaccaccagtttatttttgtctatctcatgcaaatttccacactaacagaaagtctacaaataaactctgtccttggacttaacataaactgacatattgccttattttttccagaaacagataaagttgtctcatatgccttaaccccttcctgtgtcctccagccctcccaataattaataaccaccctgggattggcaccctttcattacaggtatgggcctccagaaaccattctgatgcacattttccctccaaaaagcatttcccactaataacgtgtgtccaccaagcgacagggcacacacatttcctgtacatattctcttccacatttttcaactagcatacttatcacacaaacatttttaaatgctgaaactgaggttcagaggtgtgaagtagtacagatcacattctgactagtctgtgtcttactcgccttttatgttcctgagacatagcaatgagtccagcacgtagcaggcacttgaaggccattccaagacacaacacagggaaacaggtggcaggtggaaagagtgagaggtacaaagaagcctggattccaattctggaattctgtgaatcttacagtggctcatgtgtaaaacaaataattatctaaggcaatggtggcaaacttgagcagacatcaggaacactcccagggcttgtgaacacacactgtgcacagcctcctttcgctgagattctctcaggtgatgctaatgctgctggttcagggattacacgtgagaagtgctggtgtttgaacagcagacatgcagcctattcaactttcatcctagtcttccaggaaaactgttctcactgccatgagaaacactctaattgccaaatttaacgcaaactttttatcggcaactggactctcccctggttttcctgccacactaaaataccttttctgctgtttcatcacctccaccaccttcaagtttgattcttctgccgtccccttatctccaatcataatctaaatactgataactactaaatcatcttcttgacaatctcctccctccccaccacaaccctctccacaccaccttcctggctactctggtctagaaaccgaaactggacttggcactttttttctcattgttgacatttgctttcaaaatccaggtaatcctgtctgtctctcaattccttggatacctatttaaaccagaaatctcatctctttccaaagacaagaaatctcctaaaatgtctctaccaccaactaatcccaattccaaccatctaccccacgttctttctctacaaacacagccacgctgcaatttgacaccatccatgtcaccacttcccctactgaagcctttccatggctccccagaatctcagaagaaaactccaaatttccttgcagagcccataaagacctatcatcagcctaacttcccttacaggctttaatttctacacaactaccaacacccctaattgataaggtatgagcatctcataggggcaaaagctctcatcgtcagaccccgtgtccaaacaaatgccagtgtttactaactgcatactgatcatgacttcaacagtaatgctacggtaaatagagttgcctttctcaagagacaagaataaaaagtccattctcaattctttttcataccaatgtgttggcacctagaaataaacaagtagtcttaatttaccagctatgtctgtttcacttactgacctaaggctggctgttcgttctgtattgcaaagaatgcatgatcctatgtaaccctgagagaagacctcaataacacttaaactgatatattttcgacaaattaaatgactcctcttccaggcctggtggggcagctcatgtctgtaattccagcactttgggaggcggggggggcgcagatcacctgaggtcaagagttcaagaccagcctgaccaacatggcggaacccactaaaaatacaaaaactagtggggcatgctggtacatgtgtagtcccacctactctggaggctaagacatgagaatcacttgaacccagaaggcagagtttgcagtgagctgagatcacaccactgcactccagcctgggagatcaagactccatctcagggaaaaaaaaaaaaaaaaaaaaagggggctcccaatccaaagacaagatttaactctacctctaacaatactttacaacaatcaccattgtttcagctacctaaacaaaactgaacctcttctttggtccgtgcatcccagccagttccaacatttcttcctttatgcagaatgaggtttcttgcagttgtttagctctatgacgctggaataatgtggcagttgggggtttaatgaagaaattcacacttacccaaagccatgaggactgaccccaccctcccgccaaaaaaaaaggtggtatggcatacatacaacttcattttaagttaaagctgctagggaaagcaaatatggctatcaagaagcaaagttacgattcttcctatccttacagtttgcaatcatacaagaaacaaaaggtgtgttataagcaaagtggatgtatgtagaaatttaccatttacacttcggtgatgtgtgtgaaaggacagaggaggaagtgggggagataagaaatttgctctaaatgggaaaccactggagacttcggagcaaagaagtagcagactttgagcactgactgcagtgttgagggtaaatcatgggggacagtggtgtggaaaaacaagggaggctgaggcagttacctgtacaagagatgaggaccagggtggtgccaaagactgacaactggttaaattctggaacatttacaacactgggccaagagaaggctgacagactagatgtggcgtgtgtgaaaaaagggagtcgaatacatccaaaggttttcaactcagtaaatggagtcacctccactgaatttttcaatgtgctgttacctgttacagaccttagagaaaataccaaagttcagtccagagacatgaatgtagttgggtggttttaatcgaaactcagaatataaatttaggtgccctaatttactgaagagcaaaataacaaaaaataaacaaaagcctttatgtattgatttaaaagtcaggagtgaagtcaagtcaaggttggcggaccttgctgtgcctttttttggctaacaaggttttcagagcctttgggaaaacaatgctttaaaaaagaaagactaggttgggcgcagtggctcatgtctgtaattctcacacactgggaggctaaggtaggaggattgcttgagcccaggagtccaagacagccctggccaatatagcaagagaccctcatctctacaacaacaaaaatttaaaattagttaaaaacttaaaattaggcatgacggcacactcctgtggtccaagctactcaagaggctgaggtgagaagatcgcttgaacacaggcattctgaggttacagtgagctatgattgagccactatactccagtttgggcaactgagtgtgaccctgtctcataaaaataagataaataggccgggcacagtggctcactcctgtaatcccaggactttcggaggccgaggcgggcagatcacgaggtcaggagttgaagaccagccaggccaacacggtgaaactccgtctctacaaaaaatacaaaaattagctgggcatggtggcacatgcctgtaattccagctatttgggaggctgaggcaagaaaactgcttgaaccaggacccaggaggcattgccgtgaactgagatcatgccactgcacttcagcctgggctacacagtgagactcagtctcaaaaaaaattaattaattaaatattataaaggaataaaatagaaataaataaaatataaagaatgactaacacagaagagtcttggatagaaagagaaattactcaagagccattctctgaaaatctacatttgacatcacaagccctaactcataagagatgaggttttggttttgctaatgtaacagtggaggacttagaaattcatcagtcggccagacgtggtggctcacgcctgtaatcccaaaactttggaaggccgaggaagatagatcacctgaggtcaggggttcaagaccaacctgaccaggacagtgaaatgccatctctactaagaacacaaaaattagcaaggcatggtggcgggtgcctgtggtcccagctactcaggacgccgagacaggagaattgctcgaacccaggaggcagagattgtgccactgcaatccagcctgggagactccatctcaaataaaaaaaaaaaaggaaaaagaaatccatctgtcactgctggtggggaaattctaatacccgctgaggttataatcaaccctacccacctctctctaacacacaccccccaccgctacccacagatagccttatttatacttaggctttcaatgcaaataagaaaaatgaggggccgagtgagtgaagtgacactgcctagggcctgcccacgcgggtagctaaaaatatagtcatgagatactctctgagcaacaccaagactattcaggtttcaggcggccgcaaatcaaaaatatgtgtgtggcagtgaaatgaactttctctccagtcaatgaatccaggaagaatccagaagagcaacctctggatgccacatcaggggcaggacataccgtcagaaaagctgttgggacagtaaagtatacagcagcgcaacatccaaaggagtaaaccctacgacttgcagggagactgcagaaaatcattcccactcagaaaagtttttatttaccaacctgcgagtcacaccatgctgctatacctacacactgtggtttgaatttcttcttccataatccttgagctcctgaagcaaagattctccctaaaacattcttcactgcatttcctagaaagctacattcctacctttctaacaagtcttcttatcaccactgctggtggtttgtgttcaagcttctgcagcactcactgggagcactctcctagaatactagtggtcaggcatggccgccctggaaaccacttaatgacttcctcaccctcacattgacttaactggttggggtatggcctgtgccagagatcttataaactcagaatggctgctctagaattcagtcccgccatctcccaaatcagcctcctggcatgaaaaaatctatattctgacaactccttaacatcaagactggtacgcgttaaaagcttagtaactaactgtagagagaaagaagggaaacctttgtaactaaggaaaccaggtaactgtttaaacagagcacacggaatggcttgatacatgtttttcttgacagtaattctctgaaaatgagaattcactattctcagaaaaagcaaaaaggttacagtggacacaagttttcattcactgaaacataaaacgagcacctactggcttcaagaaacagaatcaatctgctatcatccattcaaagcttcggttgccccaactcaatgatgaaaatctcattaaccctgaatctctgagtcagaggtaattcagtcctaatccaccaacaacacaaaaacagtgtgttagtaccagtatcgggaaactctgttgtgattcttcatttatttaataatagcagaaaggagatattggaaaaaccagaccatctttgattcaatatatctcatcaccagaaactaatcactaattaaagtcaatatatgaagatgagaaagtttttcttcctactaacattaaagttgatgatagaaacgcttataagcagaaatagtaaacaggttatattacacaaacaaaaaattttttaaagctagttggggtttgacaaacttcttagaacaccttacaaaagccctgacctcaaagaaaacactttccaattttaacatacatgcccacacaaagaaacacagcagacacgccccagaggccaaaataaaatgctctctagtaattaccgtaaatagaaaaaggagatgggcttcctgagtcagaatgcagagcacaataaaaaccaccagcacaaaaacatcataaacaaaattacatggacaacagtaaactcagaagacggtggaattgcttgtcagtgtgatacaaagaaacacatctggaagatgtttaaacaagagaagggggtgtccgtgggtctgcagagggctgctgcaaggatatacagcatgccagtgtcgtcctaaaagacacaacatagcatccggaaacagctcactttctgcaggagaaacagaagagtttctttaaaatcccaccatctacagtttaaagatttgagaaaagatttcttatttttctatattttgattatctcccctaaatttgatacagaatttctcgaccaagggtctttcaacttggcgaattaaaaaaaaaatcaataaataacatttgcttagagagacttttcccttttacaaacagcttcagtctccaaatacctcttaaatgaacatgtaagacagttgtccatctagacccacactagacccattttgagtatcagtttgaagttataatttatgttcactgacatgtaatgtttaaatcacatccataatgaacctgtgattaaagactaagaatgaattcagagcataaaaataagggcacatttgcctcagaaaccaagcccgtgtaaattgtactgtattttatttgatccaaagttgcactgttgtaaaaattgttaacttcattactgcaaaatcccatgtgatgtatgcttatggctgcacttattcagcgtacttcatgaagactttacatactcaatgaaaaaacgcatgactttcctaggccatgaaggacatctggctgcagcagcccctagtcttgccagtaaggcttcgttccctagagatggtctttcactctgcactgagcaaaaggtacttagaacacatagccaagtaactgtgaaacgaacaaagttttttgttgttgttttttgtttgtttttgagacagtctcaatctgttgtccaggctggagtgcagtggtgcactctcagctcactgcaacctctgcctcccgggctcaagtgatactcctgactcagcctcctaagtagctgggactacaggcacgtgccaccaagaccaggtaatgttgtatttttaatagagatggggtttcaccatgttggccaggctggtcttgaactcctgacctcaagtgatccgcctgcctcggcctcccagaacactgggattacaggcataagccactgcgcccagcccaaaaacaaactttttaacataaataacaagaatccaaaatatgagataatgaaaacaactcagtcgcttgtctctactttgttcctgtatttacattaggaaaatgtgcacattaataaaactataatacatttcttcccacttcaagcttatatttatgaatttgcctaaaaaaaaaatgctctcccttacatatgaaacacaatgtactacgtgacaaataggaagttaaaatatatgtacttgttaaagattccatagacgtgaacttaagacaaatccactagaatgactataataaaaacaaaaagaaaaacagcagacgttggtgaagatgaagaaacgggaaacctcatacagcaattgtgggaaagctacttaggccaagtgtgggttcctcaaaaagttaaacatagaattattcaattctattcctgggcactcatgtaaaacgtgaacacaaatgttcacagcagcattatacataatatccaaaaagtataaacaacccaactgtccatcaaatgatgaataaatgaacgaaatatggcatatacttacaataggatattcagccgtaaaaaagatttcatggggcagcgtggatgaaccttgaaaacatagctagggaaacagggaggcagagaggccacatattgcaggattccattgctacgaagtctccagaataggccaacccacaaagacagaaaatacattgctggctgccagaggttgctgggaaaggaggggggactactgctaatggatatcgggtttctctttgagagtgatgaaaaagttccagaaatgtactaagtggccgggcacactggctcacgcctgtaatcccagcacttggggaagtcaaggtgggcagatcacatgaagtcaggagtttgagaccagcctggccaacatggcaaaacccgtctctactaaaaatacagaaattagccaggcgtggtggcacgcacctgtggtcccacctcctctggagaccgaggcacgagaatcgtttcagcctaggaggcagaggttgcagtgagccgggatcacagcactgcacttcagcctgggtgacctagtgagacactgtctcaaaaaaaaaaaagcaagaggaaggaaggaaggaatgcactaaggactaaaagtctatgaactgtactctttacaatggttacaacagtgaatcttatgtgattttttacataagcaaaaataaatcaactaacctaaaatcaaattgtacttaaaattacttttgaaatactgtgtgtgaataattattagtattattagtattttatccccatatgaaagttctagaatgtattaacattagatataaaatcacctaataggcaaaacaaaatcataatcactttgagtaaaaattttaagatttctgcatatattgcagccttagtgatccaaaatatcagcttgcattttttgatgttatcaagttcattgacaatttctaacaaagtatcacttaaattaaattaaattaaaaagtagcttatcaatacaaagtacaggcagataattcctttataacttatactaactacttttgagacctcacacagggcagaatgggaatgtgtaaggttttctctcctcctaccctttgcatgacatccagtcagtgaccaaatccacacaatgggagggagggttcatatagtgctctcaatgaacattcttctggactttcaattatttctttcttgaactcttatcatggtcagcaatccgcagcctaatcaagttttttgtgcttgctccccacctgaaattcacctccccggcttttctaatattcagttctcaaatatcaccttcttcaaagccttctctgaccaacctataccccagtctaaggaactcctttaacattctttacagcatttatcaaccacacaattcttgcttgtaggggtaggtattctatggtttccaaactacattaccagctgaatttcaccagtcatgtggcctaacccagctaagtagcattcgatatactgtacacttttacagtccggtggtctgggttcaaatcccagctgtttactggctctatgatcttggggaatgttaagtacatgctcatttccttatctgtgcttgaatgtctgctgtgtatataatacactgaaagtttttagaagtgtgcctgacactgagtgttacttaagcagtaacatcaaatgtctaacccctgtgttaacaaaggacaaagaaagcattaaagtatgcagtaatttcctgttgctgctgttaacaaattatcacatttctgtcttaaaacacaaattttcttacagttctggaagtaagtagtccaaaatcagtttcactgtgctggtggtgttagcaaggctggatttttctgcaagctctgagagaatccaataccgtgcccttttcagcttctaacggctgctaatatgccatggcttgtggcccccttatccatcctcaaactgcatcactcccaccttcggtcctgtcttctcgtctcattttttgctctgacagtgagccacctacctctgtttaataaggacgcttgtgattacattgggctcacctggatactcttctcgtctgatgatccttgatcaatcccagctgcaaaatcccttttacttagatacacctgtgaacaagactgaacttgctgccattgaaatacacctcatgctgaactctgaaaaggctatacagggatgtgctggcacagaggggactgttatcttaaactgtacgctttaggaacataagtggcagatttttttccccatttgtttttattttactgtacataaaagatcagttccttgaatttcctactgacgaagtatgaacacctgagtgggtcaaaaataactggtggctccaactcatgcaaaactaccatctctgttacgtttccctagaaagagaaaagtaattgttttgattgaaaagaatttttttttttgcattgaaatcctgaagaggtagaaggagtagagtattggttgaaggggtttacaattgttctgagttctcaataaagagaaacatggaattcccaccaggaaaaggatcattctaatgtgacaggctcctaacttctgagccagcagcttattactagaacacttaattcaccacgatcaattggcattcgattttggaataaaattttgctgttgttgttcagaaagagaccttcctcgataatgatattttttcctaaataacataagcattcttgtctccaaactgctctttttaaaaccaccatttaagtagaaatttaagtaagatatgaatgaatcaaagctctctcagaataggtacaacgatatgaattaagctcaagatttctactgtaatgtatataagtgaacaataaacacatgaaaacatgctcaatatcattagtgggtaaatgcaaattaaaacagcaatgcgataccacttcacacctactacaataactatttttctaaaaagacaggcaacaagtattggaaaggatgcagagaaactggaacctcaaacagcagtgggagtgtaaaatgatacggtggctctgaaaaatactcaaaaggctattactcaaaaggttaaacagttgccatgtgacccagaaattcaattctctggcatacacccaaaagtgaaaaacagtccacaccaaaacttgcttacaaatgttcacagcaccattattcatcatgacgataacatggaaaccacccagccaagtgtccatcaactcatgaatgcataaaatgggacatatccatgcaacagagtattgttcaccaataaaagcaaaagatgtattgatgtctcaatagccctttgcagctgtaataagtaacctcgtggcgctatgctatgcgtatttatttacaaaacttattccactgtacacattatttacagtgaatttagacttacagtcatgtctgaggggggaaaagcagaggttgcaccctgcctttgaactgttctgcctgctggaagcacaccatcattgtctgctccctacatgacagccaagtgaactacttaatagacactcagacaacttcatgtttccaggacgttaagggagagtaaggtggaaaggactgaagcacaggaaaaggatctgcaaggaaaccccaagatgcagagcttcatttgtatccctgacttagacctcccaggccatgcttggagccttcccttcactattctgattcctggatcatgtggtcatgtggtcctctggggactttttacttagtaatctacatctgagctgggggaagaatagtcttcctctccaatgacaatgcacgttatcaggaaacagcttacagacagaggacaatgtaacattaatattaagaacggggtggagaggcggggggctacatagtttcttaacaagagagccttccttgttaaaattatagtctttcaggaatctcagctaagcatgatggctcagattttagcagcctttaatattttctgttataatgaataatatgtcaataaatttgggttcaagaaactaacaggatttcaggagggcaacggggaagataagcctgcaatgaagagctagctgtgttcctcccttacgtcggacagaaaagagggagaactattactgaaaaaaattaaaaaggaagaaatatcaacatcaattttaaatgcctcacagcctcagattcggcgcagtgattatccttttttaaaaggatatgtacagtagtaactgctctttaataccatctctcaagccaagtcaacactagtttgaagaatctcctggtatgtcatcagcagagggaagcggggagtggagagcacttggaagaaccaagagggtgagtgactcaggccattgctccctgccaagggaagcagctacagatgccaaaacatcccattttataaggctgcacaaaagtgtgtgcctctctggaccacacagcaactcatcagaagcccaggataacttcccagttgaatccatacattggtcacttccccaaggagagcaaattaaatccagtggtgaataggattggctcccagaacacaggtgcaagtcggtagccttgtgtgatataaatgcacctactcctagcatcagacgctacacatgcaccaacatttgccacccctccattttacatgaggaaagtgggacccagaaagatctgctcatttgaacccctctggagcagagcagggatgagacccaggcctcctgctccatgaggccagtgtctttccatgaggaccccagctagaaggaaggtttccagttttatttaatccagcaatccctacctggtagctattggtgggaacaaaaacaagaggttgaccggaatcctcccagcttttcccctcactcactcatattcacctttcagcatctctttacctcagagaagtttttaccagaccctattagagcattagttactgttggtattactcagaaatgcttggctcacctactaatctataggctccctggggtgacctctattttcctcatacctgatgagcacagtaggtcttcagcaacatcctcttcgttaaccaaaaaggcaccttcaaatatgaaatttgtattttattacataccactcaaattgaaaacatgactgctatttagtaacccttaatccaagatatctgctttttttttttttactttgaaatctctttcagtacaaggatgtggcagtttctcctgcctccagctaccctggaataagtaagcaatccttgaggacctaacataactttgaggaccgtcttcctgttactaggttgccaaaaatatttgggagttattttgcaatcaaaagtgaaattttggtcattcctcccacaccaaatatttcactaaaatcaaatgtacagcctgctgccactcagtttctatgcctttgttaattcaaaaaaaaaaaaaaaaaaaccttaaactatgatttggcattgaaatgaaatccatgtgaatcttgtttaaatagcaattaaatgcaatcagtgaaggcccaacgatgactataaggaagtgatgaggttatgaacaacctggaccaaattcactcatactcaggctatgagaacaaggtgactgatgcaaatgggttgtttgtcattttaggcattttaaaatgtgaataccgagcacatcttggaatcagctaagtcagtaacaccaaagttcttcccactagctatagagtctccgtgttactaatgaagacgaacacctgattagatgcacgttttgattaacatctccagctcaagacacggagaaactgagtgagccaggtgaggtctgccttcatcagaaatcctgcaaaacacagcttatttccttcatttcaggtgcttggtcaacatgcagcacaaaaataacagcatattggtttcccagtcccttagatcttattgatcatgattctgtgacttcacccttagacctttctgatcatgattctgtgacgttactgatgtatgcctcaggtcacagcctcaagcttgatggaaagggctgtctccccaaattccagccgcgtgttaaaacagatgctgggcttgcagagttcaacaaacaatacagcagacttatccaacattaagatccaggacatggtgggcccagctacttccactcaacccatctctgttaactttcctcatctaaccaataatacgggaccacaagaaccgagaatatccagatttgacatccttagcaaaagacgcagaatcatagcctgagaataaactctgtcattgtatatacatttcaacggtgtccgtctcatctccaaaaaagagtacctgcaaggattcaagctagaagagatgatgtattaagctgaaggccagaataaggcattgcttgcgggaaggaggtagcatccccagccttcatctttccttctgtcttttgatagaatgcagcactagcgtaaggggtggtgggggagaggaactgggaagctcggtgtttctgctctggtttttacttcccttcatggaatcccttccttttttcttcagcattcctgcaggagctcctcacgcgtgatgagtcaaaagccatcagtgatctttggccaaaactacaattatggagctgccaatgccaaaatccagtcccacttctaaaacagtgcactttaatttgtactgttcctccagactgaacaatcctggaaatagaagtgagaattttccaacctgcaaataattcttctgaaaacgtccaagtcattctcactggctactccagttaggcccacttcacacacgtaactaattagggcacacaatgttgttgtggttgtggatggagacactaaaaacttacctgcccacaaaattccatccagatggaacatttttctttagtatctcccacctccaacaaaaagtcaccatcttggattagaaaataaaacctaatatagcaattaggtccttcaaaactaaccaggacctatctaccacatcacccctaaatgagctatgacttcatagatgggatccacatttttcttttaatattgaaaagcagaccaacataagctgcaaggtcaagagggaaactcatgttgcaatatggtttcaggaatctcagtgaaaacatttttcccttcctaatacacacacagttaatgtgaaaacccttttcaacattgtccatggagttctttcatggtcttaattaacaagtcttaaacttccatcctattgcttcagatggtatgctactgaagtaagtatttcttttccaattaattggcttaattcatccgcctccacctctccattcacaaagaggtagaaaatagcaaccactaaacctaaacagcaaagcctactctggttagagctccccacgctagttctcctgttgcagctgcttctcatctagctgggagctgggtctgcaaaagcttgactgtgggctttttacctgtatggtttcagcgaagaataaagaacaatgtttgacatttttatactcgagaagaaagcaagagcaattctctctaccttttcaagtataactgaagagaagaggaaaagaaaacccacaagttaacttctagaaaaaaaaatttaattaagttcaaactttaaagcatttctatgagcttatgaagactctgaaccagtcccagcccatggaagtttataaaatataatttaaaaaatactgagaacccctccacacaaagattatctactgcaaagaatattcatagaaaaaaatagaattaaaagaaataattggccaggtgccgtggctcacgcctgtaatcccaacactttgggaggctgaggcagactgatcacgaggtcaggagttccagaccggactggccaacatggtgaaagcccatctctactaaaaatataaaaattagccgggtgtggtggcgggcggctgtaatcccagctattcgggaggctgaggcaggagaattgcttgaacccaggaggcggacattgcagtgagccgagatcacaccactgcactacagcttgggtgacagagctagactccatctcaaaaaaaaaacagaacaaaacaaaaataataataattataagaaaaataaaataactaaacttccttgcagctgggtgtggtggctcacacctgtaacccagcactttggatgcttcctcttgagcccaggagttcaagaccagcctgggcaaaataggaagacagcatcaatacaaaaacatttttaaaatcaactgggcatggtggcatgcacctgtgatcccagctatttgcaaggctgaggtggcaggaaggtagaggctattgtgagcctctacttgagcctccacttgaggcctggaggaagaggctattgtgagccatgatagcgccactgcactccagcttgcgtgacagagcgagatccgctctgaaaaataaatgaatatacttccttgtccagtaaaggatttttgagccatcaccaccaacatacacaaagtggaaatgtttaaaccccaacagaattctactttttaaaaagtcattggtgtaattggtgaagaatatctcattcttcatctcattttcttacacaagctcaacaataatacattagagagtatacccaggaatctaaacacatatcatggaaaataaaatatttttctcaaatgctcaccaaccacgtgaggaatcagggaaggcaaaatgaattctgatggtttaaaaggttaaaatactgagaagaatgcttgcttgcatgaaacaaaataatcatttctctcatcatcaagcatgtgcacttctcccatacttcccaccacctccccacacacattctcgttaagtcctgcatttcatcaacatacttcctttctaaatactttcaaaaggtttaggatagcatttcaccacctacctgggtccttcttttccccatatcctcattctgcccataaattatagctaaattctcaacccaactacttaaatatatagtagctgctgaatatttagttacttcacatgtgttctcatgttcttaaccacgaaatgtctcagggatgacaaatactgctttaagaaaacagtctacctatcttttcttctgatataaaatattacaattactgccagggaatggtggctcacacctgtaatcccggcactttgggaggctgaggcaggcagatcacaaggtcaggagttcgagagcagcctagccaacatggtgaaaccctgtctctactaaaaatacaaaaattagatgggtgtggtggcaagcacctgtattcctagctacttgggaggcagaggaaggagcactgcttgaacccaggaggtggaggttgcagtgaaccgagatcacaccactgcgctccagactgggtgacaaagcaagactgtctcaaaaaaaaaaaaaaaattacaattacttcaataggaataacttgaccactacaagctggtcactacaagcatccagacgttgttagagcagaacaaacaaaatcaagcaaggctcctggagatcaagacaaaacgatggctccacatcccctctcccagagaagtgggttaggtacacagatgcatcaaccaaacgcgtaaaggcagaaaggaagaaagaaaaaagccacaccaaagcctactaatctgccctgcaaacccagaaaatcataagcatgttaattgaaaccagaatctgagaaagccaagcaaacttaaaaggggtacaaacatttataacaagaggaggcgactcatggatttaattacttccactatatatgacaattaagaataaatggtggaaaaccacaaaacagcagacagtaaagaaaaaagttaaatgctgattgccattagtgttaactggagtttctaacacctgctataagctactgtgtaataaaaaatgaattactctcctaatgaataaatgaatatcttaatggaagccaggatctttgggaagcacatttaaactattttatgccacaaaagtaatgttcaccaaatagatgctttaatgcgcatttaactagatgaaagaccctgaacctctaagcgtccaatctacatctgacaacagacttttatcagacaggaaaaatcactgaataataattcattatttctaatacagacagctgaacgacaacaaaaccacgaacacttacggaatgtatgtttcatatatcaccactccatgaaagaaaagctaacttatcccaagttgcaaacctggataagcagcagagcagagattcaatcccaggcagttcccttcccaaggcttcatcagtgtgagccttctggtccacccaaggctcaatgacccagtaacagactcccagcaacccaagggctgtgctgaactacaatgttgcccatgtaactctaagaaaacgtaagaaaatggaattctttctcagaaaatttccatctaagaggaataaagtcaaaatcggtattttaaaggaagcaaacttataaaagctagaaaatgtataaaatgcacttatggtcttatttcggtcccagcaatgggaacgaataatattaaataaattaatatgtttaattatgaactgaattttagttgaaaattccaagaggttgaattacttttccatatactacttcctatcaaaagctctttctcaattacacaggaaaggatgggaatacagtaactagaccaagatcaatgagtaagctcgagctccagattttcaattagaggacaaataaattaacaacggttctctagctgaggtgcaactcgtaattgacagcagatcaccccaggtttccatatcagagttgggtagccggaggtaccaacttggtgaatttttgtacttccaaaagagattcaggtacacatccctgcttaacaatattaaactatgctgcgttcctaaatctgctccagcacctcttgaaaagaccttgaaagacaagaaacttatctacatatatagataagcagcatacaatcagtctcaaaagcttagaaatgaagaaactatactagaagcttctaacaaacatcacaggaaagcagtaggaaaatctgccaactatcattcctaagcctagaaaccagctgctgcattaaaaaaacaaattacactgataactgatatttaacatgcattatatgattttgcaatagcagcaaacttacttccctaattcaattgagcttgtcaaaaaattaaaatcttcaactatccacacaaaagaatgatcataatccaaaacggcaggtaatgcaatgccttcaaaacgttttttgatatttttattattattaatagcatttttacagaataagctattaataaaattacatttcagttgatgttcatagaattacaataattaagaaattattacagaaaacttcatacaagtaagagacaacctgggattaaaattttttcctgggtggaaatctataaagaaggtaaaataaaaagctgtgcatcaaataatctgcatactcatggtaagaaatagtcatagatcatttgtttctacaatcagagactgaggaatgggaatgttttggacttaaattgtgatgcttgcacaacctaacagttaaaaaaaaaaaaagaattgtacactttaaatgggtgaactgtatatggtaagtgagacatagcaatacagctgcgttggtttttttttaaaccagagagctcagactttagtaggactctcagtcacgttttttaattccatttttcattacatcagccgagtctgacaaagccacacacactccacatcccaaggtaagcaagtagggaaattcctatatgccagagtgtgctttatctaagttacatggaacatgacagaatgttagagaggaaattatacccactcaagcaccacccactgaataaaaataacagaattagtaaacatctccctctttcatctactttccaaaaacgcttcaagggtccaccactaccacgaaagtaagtttcacagccacccttggaaatttacaaaaaaaaaaaaaaaaaaaaaaaaaatcactacatactcccaagtaaaacagattatcatgtacttccttaaaattcaagagaattttgcattcaacgccctgtctgtctgaaagggtggctcccactaactctcaggtcggggtcctctccgcaggatcagcagcaccgagcttaatagtctggagctatttattaagtaaaaggtcctcccaggtaaatctaaaagtagcatacaacaaaaccaatgtcttgtaatgtaagtccagggcaccgaagttattctcaaaacaactgctttgtttttttaatctaacaactcaccaccagcacttgcttgtctagctggcttatagtcttgtgatcattatgccaagatcaatgtacattagtctaaacaatctgatcttaaccagaccctgcttctgtcaaagataactgaagagcaacattaactcagagaacatctgctcaatgttgggggacacagtgacaggataccggctgcccttcctctccctccaaatacaccaaaatggaaccacacttagcagaggcctctttgactgcacaatagcctaattttatagcaagagactatcatactttcaatacacatccaactctttaatgtaacttcaatgtgattaggggctagggaggagtttttaatgggatattcaccatcattgtattccaccagcaataataatacacactaaatttggttacatttgaagagaacttaatgacactcttccatctggaattaaatgggaaaaccccagaaatcacaaaaccaaaatttgaagagcatgctcatgagcttttttttttttttaaatccttaactaggactgtgaagtaaagcagctattccctttttttttttttttttttttttgacggagtttcgttcttgtcgcccaggctggagtgcaatggcacgatctcggctcactgcaacctccacctcccgagttcaagtgcttctcctgcctcagcctcccaagtagctgcgattacagatatgaacaccacacccggctaatttttgtatttttagtagagatggggtttcaccacactggccaggctggtctcaaactcctgacctcaggtaacccgcccaaaacactggataccacaaaatgtcttggcctcccaaaatgttgggattacaggcgtgagccactgctccaggcctaaccgtcactattttacttcccaaggactcagtaaaggcgtcttcaatcaaagcacctcagtaataatttcctaacttagtactagtactaaacacctaaattatgggtaagtaacgacacaaaataacgaggtgggaaaaggtcaagatgcataataatgttcactttgaagaagaagctagttgaataattttatggaaaattttgccagtataaaccacaaatttttctataattttaacaaactagaaaagttaatagaacttaatagaataccccccattaaaaatgtgtatattctgaataagcaattcactcctttttatcataaggagttaattatgaaggtgcactaagctcactactttgttactttcaacagcacagaattagatcaaactaattctaattagtttgaattagataccccaatgctaggtaggtgctaataaattctaggaggcaatgcaggacagtgactgggctgacaaacctggagcatccaaccaccctagttggacagtatttagtgtctgctctgccccaggtttccacccttgtgggggtagtcccagaggctaaatgggcacaatgggtggggagagggatcacactgcatactgcctgggagacaatagatgtttacagtaagtcgcacagaggccaagtggagagattgtggcgattcaactcagctgcccagtggaacattctccacccaattacaaggaaagatgcagaaaattatttaaaagccagactttgagagactgagcatgtgcaatgctgctccggggattgtttctgttttgtttctcgatgttttacccaacttggtgaagaaaaagaaaagaaaaatggataccacaaaatggtaataattatcactgtgtggtataaatgctgtcccccccctttttattttagcagaaagcccaaatgttctaagataaaaatatattgctcttgtaaatcaaatacaaaatagggtatggaactgtactcaacaggacttaaataggattgaaataatgaaagaatattcactcttctttctacagtttgagtcatgatcagtatcacacaccctcccataatattaaactatgtcatttcatttgtttaaacatttattgagtctatcaatgcagatactatgtcatcttgcccttaagcgggcactactctaaactctgcctttcatcgatttctctttgccatttactaacaataaagactaaacccacaataggtggcaaacttacttggcacctcttcagtcactgctagagtacagtattaccccccaccaagaaattttatatacaaatataaattattctgatgacaaaacagaaggtccagtcaatgaagtgtgggaagccttgttgaagcatgactcagtacctataatatggcagggtcatgacgggtaggcaaggttgctggcacatgcctatcttaccctggaggctggggcctgccctagaaactttgtctactttcctgtgtgttgcagagaagctgaaagcccctctgcttctagaccttacatttgctgtttccaagtaaaatcataagtatacataagaaaactttttaaatatcttccactcaaatgtggaagagtaaaaaagaacatatgggagggaaaaacatttatgtaaacagtaggtacatgaagcaagaaaaaatgggctgggcagcaggcattatttctgcatgaattttttatacttttccatcagctaggaaacatctcaaaactgcacagaagaacccatcaaaaaattttatgtaacagtgaaaataacactttttctaacatcacatgggcaggaaggagagcgtgggtataaaagaaaagacttccttttgaatacagtctcttttgtttcacttctttttaaaagagataactgtccttggatatagaaagtgtattagcaccgcttcctgcttcgaggtggtcaggtctttgaccaggtttaaattactatgcagagaaagactcatcccttcccaagacacagcttggaggcaaacatcgtaatcccatagctgacttcaggacttcagataggtcataaggccaactgagtgttatctaaaactatcttacattcacactcacatttttcccactaaagaggaacgagacacatttctgaccagcaaacgaccaagtaggattgaaataaagatcacggcctcagcttcataaatctaactctaccatcatggctataaatggggcacaatacagaacaccagcagggctcctaagtcctaggaatgaatgaataaaagtctgccccaatatattgtttcatatatatcacctcatgggtttctccaatatccatccactacaaagaccagccaaagcaagatgagagtagtctttataaacctgaaggttggcatatctagtcaaggaatcacaactacttttcattagcaccaaactggttgttcataactactcccaggtagtaaaatccacacccaactaatgacaaagtatcaaaagtacaatgatgtcgcacaagtcacagattgagaatcaggctcagaaatcagcccattattgtacctgctgtatgacctcactggacatcagcttccttcatttgtaaagtaagaatgaaagaaggtgcacacaaattggaaaggccatgctcagcacttcaaaggcaccccaaattacttggcccttgttctttaataactttatagacacagcccattagaacatggcatctgaggccgggtgcagtggacaaaaatacaaatgtcagtcgggcatggtggcatgcacctgtaatcccagctactgaggaggctgaggtgggagaattgcatgaacccgggagtcagaggttgcagtgagacaagatcacaccactgcactgcagcctgggcagcaaggcaagactccaattcaaaaaaaaaaaattaatgccaaagatcatagagataagaagtgaaatatactaacagcaacattgtcctctgagttttttctccctggtgaaagaaatgaaaccttgtatgggagcagataaactttagaagagagctaactgggccaggcatggtggctcacgcctgtaatcccaccactttgggaggccgacgagggcacatcacctgaggttgggagttcgagaccagcctgaccaacatggtgaaaccctgtctccactaaaaatacaaaattagctgggtgtggaggcacatgcctgtaatcccagctactcaggaggctgaggcaggagaatcgcttgaacccaggaggcagaggttgcggtgagccgagatcgcaccattgcactccggcctgggtaacaagagcgaaactctcttaaggaaaaaaaaaaaagcagggcgggtggggcgggagagataactgttcttgccctatctttagcagttaagaggtgcaccctgggaatacctgcatcttctctcttttttataagagactgaggtagccactttccagaggtcctctaatgtaatttctggtcccagggccagtttttgcaacttcctcctgatatcaggggctgcctgagtaatatatttatcctttaggattagctgtcccttggctgaatcaggagatagggaggtgtgctttactaaggcctctcttagcctttccagggaggcagtgggattttctccaaatccctggtcaatcatggacaacttagtataattgagaggcccggtcctagttctaggtaagccttccattatgcacacctgaaagtgtctccgcttcccgtcttccacctcgtcactgggatcccatttaaggtcatccattagtactgctcttccagttggataatgtttgcccccttccctgatgctgtatgtgacgtaaagctcatccccaaatctctctgctgcttgcagagcagcctgcttctcagtgttcgtcaaggtcttaattcaaaagtaacataacctctctccaggagagttcaaatattttagtgaaattctgaaaagcctctatatatcttatcagggtcatctgaaaacttgccaagatcctccttaatttgctttaagtcctgtagggagaagggtaactgggccttactgggcccaaattcaaagggcatctgctggaagggaaagagtgagactgggccttgttgagagcaagaatttttaggagggagcaagtgagaggctgaagctagatagggaagttggggtggaccataggggcagggctagagggagctggttcctctgctgggagtgcctctttactttcctgggcttgccccttgcagccttccctgagacagcaaacaggagggctggatcaatcctatattgtcggcaaaggtctggattgccttgcaaggtatacaaagcctgcacatatggggcctcagcccatctgtcctcaatgtctacagatttgccaaatggtatcaaaataaatggtttctttctgaagccaagccagtcctttctgtaaatcgtaatttggctaaacctttgtgcagagggctacgacgcatttttcctccagattctgagagtcaatgcagtcccaatggtttaggacacactccagaggagtataagctgggagtggtgaagagaactggttgcccattctgaaagacagggaatagaggcgtccctcattcccttccttctttcagcgaaaactcaggctgtgacagagaaagcgagtggcctcctttcactctccacttcttatccctgggccagccataggtaccactgcagtacatacccatgaagcaaagaaaacctggagaataggaattaactgccctcacctacgcctccatttctccctgctgtcggcaaactgagttccctgggcctgtttacaccatgaagcatggcgtccttccgtgaggtggaggatttggttggcaggacttggtccttcctatttacattgtgcctgttgcctggcctcggaaccctcagacctggtttttctttctagggcctctgcctgaagcttggaatcaagtttgggactgaaaaagcattttagaggctgtttgtatctgtgtagagtgtctcaaatgtgccctctcaaatctgcagttctcagccagcaggggccgttccttcgttaacttccctatcagaaacagagttgggagggggacccttctcactcagaaaaggaaaaaaagagagaaacagtttaagaggcaaaaaggggaaaattcaggggggtggggggagaaagccccttgcttagtgcaagtggaccccccctaatccttatgtcttttcccagttcagaccaggttgaattcctcgggcaggggttccattggtgtggcagacgagaagtgcccatccattggccctgtagggtctcagctaccaccatggctttctaccacccacctcccccatcgtggctgttgggctcagaccttgcctgctgcaggcatgcatagccacccaagctgggagaggaaaggataacaggaggtgccctgagccatgagtgcctgtgtctgtcgagctttagagacacatacatggcacctctaggaacatctggtctgatgtgcatctttggcagctgagcctaatgctcattttacttagtaatattgccaatgcctagaggaaaactcttaacattgtaaggaaagagataagagccattcaaacctctctcatgtaagagagagaagagacaaggtctgggggttttgatcggcagttagggtggtttaaaactgcatgaagggaagcagagcctctcagccgcaggaaagagatggcagggttttggaagagaggcaggaagagagacagtttcgcattcgtttacactcaccctgcgaggaggacaatggaacctttcccattacacatttaagtggagtgattacaaataacaaattgatttttatgtgtgacttactgaactacactctgaatactaaaaataagttaactcttctctggcgagagaacttgctaaccagatcactaagtctccaatcctgactgcgcaacagaattacagtaagagagtgaaaaaatacagtggctcgcacaggtaatcccagcaccttgggaggccaaggtgggaggatcacttgagcccagatggagaccagcctggggcagcatggtgagacctcatctcttaaattttaaaaacaaatgtaaaaataacatgaaacgtacagaactgtatactgccaaatctattaaaaaaaaaaaaaaaagaatcctgaattttactagtgaaccaatgctaaattagaacactgaagggggtatgtttttaacaagctccagacagtagtgttcaacattggggaacattctttccccagacaaaacggtttccctacaagacccttattatatgtcattgtacacaggcatttacaaatattgtcttaaatgtagaattaaaatctatactccagctctaactaagttagcaagcattactttttgagtttgaccaaagtagttcattccaaaacatgaaaagccacaaacatttaatcttaggttcctatttttaacaacaatatacagaaatcttcgcaatagcgaaatattactgaaccaccagtgttgttaaacacaaaaataaattagttaggcttgatatacttttccttccctccctcagattccccacctgtttttcagtttcaggaaaaggcagccactgatctccacagcactcaccggaattacctctcttctgggatgataaaggggccatgcctttatttatttatttattcattcattcattcattcattcattcattcacccttggagacgggtctctgtcacccagactggagtgcagtggcacaatctcagctcactgcaacctccaatcctcagctcaagcaatccttccaccttagcctcttgagtagctgggaccacgggtacataccaccacctctggctatttttttgtgtgttgtgtatagagatggggttttgcccagactggtctcaaattcctgggttcaagcaatccgtcccccagactcccaaagtgctgggattacaggggtaagccatcatgccaaaggggccatgctctggaggaggagatacagagcctgctccagctgttggtccacagaaacactgagcagcacataggaatgcttaaggcttgaggggcacagacagaaaatctgggagtctccagcacactcttgcagtgtggacagtggacactaggagaaaagacaccccccagggacacctcaatgtggacaggcaggcagagaaaggggaactgcaacaagaccatgttcacacagaagagaacaaagaatgaatgatggcatcccagatgtgaaggaagagcagagaacttctaaaacagtcaaacctgtcaaatgtgaagttctaaacagcactataggaggctgacctgccagaagcaaggtgactctgacatacctaacatggtcaagtgaaaaatgaggggtgtgggccaggagcagtggctcacaccagcaatcccagccctttgggtggccgaagtgggcagatcgcttgaggcctggagttcaagaccagcctggccaacacggtgaaaccctgtctctactaaaaatacaaaaattagccgggcatagtggcacatgcctgtaatcccagctacttgggaggctgaggcatgagaatcgcttgaagccacgagacggaggttgcagtgagccgaaatcaagccactgtactccagcctgggtgaaggagcaagactgtctctggaaagaagaaggaggaaaaaagaaaaaaaaagaggggtgtggactgaatatcccctgggggcccattccagttccacaaacctaaaatctatggactttcaattaccatttataaaatcaagagagaaagtaaggctggtgagtgtttaataatctgcatcatgaagaaattaaatataccccactggtttaataccactaatttttgaaaattaaaccaatgaaaatagcaatattcatgagtctaggtggtatgatatgcagttatattccagttctttaaatggcagtagtagttttgaacaggaactagaatctccccaggcccacagtaccccaagttttattgtgactttgtgtagaatttcaaaaggccttctgtatctagagttgtacactctctcaaatattacagtattgaagaaacaaacaacatgatggaagatgccctttggtaacaacagcctgtacctgacttggcccatctgtcagtcagaaagctggtaccccaaagcgcaatggaaaacagcaaaaggagcaagcacatggtaaaaggagtatgcaaaaactgctgtaaaaattatgtcaaatccagactagcttgaaatgaagagggggtgatcagaaaagtagtggcagggaatgaatggaaaaccttactccttcaaggtatataaaaagcatcctcacattaaaatacgtatcaatatagaaaaaacatttttatagaaacagaattataaggaagcattctaagatctgacttctgccaaagtaactctagggctcatgttcctattggtgacataagccactgttccataggaacccctgtgattacaaggtcaaattttattccattatgcagcacactgacaatgcttctttggagacatgatctgttaatgtatgatttattgtaattaagcaacacagtttaatgtcatcaagaggctttaattagagaaggctgctgtgtcttcacgctgtcagatcaattcctgtttgcacaaccgtacagacttatacatgctctgggaacacctctgcatgtactgagcaagccctcctttggggttatggacttccgcacgctaagatgtcatattttaaaggtttgcccactaaatatattttgtgtgttcatccaaaccagtctcggggcgggggaagcacccttctattctccagaacatcctgataggtggctcctttgaaaagattacctttaggtttccctggccccaagactccctagtcacttgtatgttatggcaccaactttgaatttcattcctgatcatgcataatgctattctctttcacccacgtatttactgaaccaatctggcactcaaatagctagaatatatgatggttagataaataagatgcagtgttcatacaatgtaatttttttcagcaataataaggaatacattctggaaatggatagtggtgatggttgcacaacactgcaaatgttgtcagtgccaccgaattgtacacacaaaaaatggttaaaatgataaatttggtgttatgtgtatttaaccaccattctaagaactgaaaaaggaggagattagaaatgaagtactgattcacggaacatggagaaacataatactaagtgaaagacgccatacacgtatggccacatagcatatgattccatttatatgaagtggccaaaataggaatatccagtgacagaaaggacattagtggttgctagggcctgggaagaaataataactgctgatcagtacaagatttccttttggattgatgaaaatagtccacaattacatagtagtaatggcttgcctaactgtgaatatactaaaaaacaccgagttgtatatactttaaaagggtaaatgtgccgggcacggtggctcatgcctgcaatcccagcactttgggaggccgaggcgggtggatcacgaggtcaggagatcaagaccatcctggctaacacagtgaaaccccgtctctactaaaaatacaaaaaattagccgggcctggtggtgggcgcctgtagtcccaagctactcgggaggctgaggcaggagaatggcgtgaacccgggaggcggagcctgcagttagcagagatggggccactgcactccagcctgggcgactccgtctccaaaaaaaaaaaaaaaaaaaaaaagaaaagaaaagaaaagaaagggtaaattttatggtgtgaggattacatttctataaagctgttattcttttaaaaataacagaagaatacgggaagaaccttaagaaacaaggagtagacagacaacgaatgtatgtattgaaaactattttggattatttcttaggacaaacacacacacaaaaaaattgttctctttccagctctgcaggatctagacaagtgaactgttcaggtcttgcaacaacttagaaggcctatcagactggcaggagctcaagggggacagctggacttacacaagtagcgcccaccacagctgcaagccaatttctttttctaaacactgtggtctcttctcctggagctgctgtacaggcttttgtcactataataaatattccttcagaaatacagggaagttaggagtaatttggaacagagctattaaatattgctccttctacataataaagctgttttgatacaatgctgctttcaaatacctgccaggttaatgaaatgaaaattaagatttggtgttaacactgggagtcttggatggtaacagtattacatgatatattctaattcattactaaaagaattgtctggcatgtttgagccccagttaatattcagatatatctaaaaattaaattcctgaggtagcttgctaatttggtttttctcacagaaccatttgacatgccctgtaaatattaataaattatcaatagttgtttctgcataaaattctaattctttgtcggaattttttcctagcacattctaatccccccacccttccttcctcactctgacatatggcgaagagcaactggtttcgagcttggcactgcgactattttcaagcagactttctgagggcatcagttcctgcatcaagcatgcagttctaatggactggcttagcaggtgtgctcacaaatatcaaacagaacaatacagtccggaaggagggacattaagtctaggattttttttttaacttatgaattagaattttctatttaatattttcagacacctgtttattttaagaaaccacagaaagcgaaactgcagaaagggggtcccaccgtactttttatgaaatggagtttcactcttgttgcccaggctggagtgcaatggcacaatctcggctcactgcaacctccacctcctgggttcaagcgattctcctgccaacatacccggctaatttttgtagagtcggggtttctccatgttggtcagactgatctcgaactcccgacctcaggtgatcagcctgcctcagcctcccaaagtgctgggattacagacgtgagccactgcacccggccccccaccgtactattaatggaagtcacagcttacattaggattcacttactctttgtgttctacattctacaggttttgacaaatgcaaaatgttgtgaattccccattcagtctggggtatttcttaaagtgttgctcaaaaagacagtttccagtattatacttctaagggcactctttctgttttccttcaccactcctggcctacaggttttttgttttttttgtttttgtttttgttttttttgaggcaggatctctctctctgccacccaggctggagtgcagtggtgcaatcatgactcattatagccttgacctcctaggctcaagcaatccacctacctcagacacccaactagttggggttagaggtgtgtgccaccatgcccagctaatttttgtatttttttgtagagacaggattttgccatatcacccaggctagtctcctgggctcaagtgatcgaactgcctcagcctcccaaagtgctaggattgcaggtgtgagctatcacatccagcctttttgctttattaaatgagtagttaattcctgaaataccgctcctttcacaagacaatgaagtctagtgagatgtccttgtacttaaggactatcttagggaacaattacttaattacaacacataacactctttcccaaaacctgaaagaagtcaccttttaaaaacagactactttgaagtattctgtctccccaagacaggaaagtgaagaatggaaggaggacttaaaatatatattttttgagaaagcttttgatgtgactttcccagtattaaacaatacctcttagcaatgattgcatcttttggctgattcaccaataataatgaccacgcagagaagtttctggctacactatttccattactcattctgtgaagtgttcaaaatgttaaatgttttgactgttttcctaatttacactctatgcttttaatatattagaactgatttttgaaatacattgtccctttaataaacaccaggcactaatctaagattgccaacctaagtcatatttctactggaagaaaaaatacactgaaacaattaacattattggaagaaaaaatgaaaaaagaagagggcaaaacccacacaccatacttcctccggtaatgtggtcgtgaccactgtgttgtatcaaactctggccacacaagtggatcaacttaaccattccaatgctggcgcaggatgtggattcggtggtattaatgagtgcgcaggcttataatgtaacctcaccagaccaaataacctcctggccacacaagtagaaaataattaaaacaagcacgattccaatttagctttgtataccagatggtgaatgaaaaagcagacaaagactcgttttgtgaataacctggggaacagcccctatagtttcttttaaagttacagcctgacttgtgaaatcaaagaggaaaggaaagaatacaaacgttctcaccagaattcactcctagagcacatatatatccttttccttaggtcatgaccagagaacatcacaactcattccttaaatgaatgtcaagtttaatcacagtaaaaacccagaaacccagtgaaaattaagtgggggcaagaatctgctgaacatctatttcaatgttgagctctgagctgtatgtaaagaaatatatgagatatgttttttaaatcatcaggactacaaaacaacaaaagtcactgcccagattctacaaagatcactcccaaaaaatagacaatatttgcaacctaacagagactcaggccttctttttcctcccctcaagaataagggcatgtcatggatgggcaaaggaagaaaacattttaaaacccaaagattcctaactttgcacaagaactctgtcagcagtctagaaatgggaagataaaatccgaatggctggctgaccttcacagactagacagagcgcatgcggtttaacccgcttattaaagataaaagctgcattcatgaaagggagacattaactaatctgtgcatcctccagtggggataaggacagcaaaagaggccatcatacagtccagtactccttgagatttacagtgagcttgccctgagtcaaacagcaaaattgtgagctagtttatttcagcacaataatcttcaaacttttctgttagatcccagcaggatgtcaactctccctataaaccctacccctgcttgctgctagcagcagctgacttccccaggcccatccctccccaactcactcattgcaggattaatcacaaccacaaagcagaagaatcccaggccagagtcccaagggatagtaagatgatgactaaggagggaattacaggcttggggtgataccaaaataatcccccaaaaaaaaaaaaccatattaaagagacatttgtttctgcctcattcaatttaagcatcaacaaagattatttctttgggttcctaaatcctgtttctgacctactttgtttccttgacacaatgggtttacaataggtgtacagatgctcatgtggccccaagggaaaaagaagaactagaaaaaaaaagcccattattaagatactacatttgaagatctctctggcttttactgctggtcactgttcacaggcttcttgaacaaggcaggtgcctccatgcccatccccacacaggtggggcctcagcagctagacatctaaggaagggtcctttgcactctacatacttgacaggtacccttcctgcagcaataatagcccatgccatattaacatgtgctgcacaggtgtaaatgaagtcatcgtgaatttgaaacagaggaaggtgtttcttgaccatctgaatctcttactttgaggccacagacacacattttgactgtatggatgttctgaagtctggagtaaacgaggctgtggtcctggctttaacacttactatattacactgggcaacctagataaacaattgtatacatcaaattctgcttctggaacaacaggattaagcagtcaataaaatttagcaatgttctaagcaccatacatctaatcacttaacgctcccaatgacactaaatgataataagtttttctattaccttcgattttcagcatttcaagtaactacaggtataaggcagcacagtaacttgcaacctgcaacagcaacctgcagacactggtgttattaggaattgcaagtaatacatgtaaagcatatcatcctgcccagtgcctggtacacagcgggtgcccagtaaatagcagctttactatgttttggagaatttggagatcctgttcacaagctctatcgctacctgaattccatacaggtgactttgtggggggtgatctttgcttcttcggacctcagaagaggtcctggaaagcccttccaggagtgttgcaagccactgacccttaaaattcacctcctggttcccttcatgaactctcacacagaggagagtcttccattgcaccaatatttattgaacagctacatgtcctgggcctgtaataaatattcactggcaatccactaagatgaatcaaaggtggctaggctggggatggtaggggttctctgaaaacaaacaagatactgtataatgtgtgtggagacaaatacaaacgaggtgcacaacacagctactccaacacggaaaatgcatctaagtgggggatgaaaaacgcttcacaaaagacataacattgagccttgaaggacaagaatgtgaaagtaaagacagcagagaccgcgttgcagtccaggtcacaaccaagcccattcatctgcttcttgaatttattctttttataaagactgtcctagaaccaaatttctatagttctgctgttttaccccagagattgctacgtgcccttctttccaaggcttcctgtgtcctttatgacctccctccctcattcttagtcctctctactcctccccaccacccactggcagcatgcggggatgcacgcacatgcacacgcacacacacgcgcacacacacacacacacacacactcttccagaatggaagggatggcagctgaatgcagtatcactcacatttatacctgccctagatgccatcatcagatctccccctcgtggcctcaccaagtatgctgaatgttacacatactgcagagttatgccctgagactgataagggactataatatgaaaatgtgcaggggtggggtggaggcgagtcaaaaggcacctatgcagccagctatgatagcaccactgcactccaacctgggtgacagggcaagaccgtctcttaaaaaagaaaacaaaaaaggaacctagaagttaccatttttatttgtctatttaaaaaacaaatttttaaaaaagaaacagcaccaaccccaaaaaagaaaaggaggaaggaggctaacagagtaagagaaaggggagaaaaaagatcccaaagcaaaacccatcagccgtgtttcaggtcgggcccaaatgttgctgccagattaaatgacccaccttcactctcaaaagctgtggcacttggaacaagtgacctcatttcctcaagaacaacaaattaaagggacagagagattaaaaacaaacatgttttatcaacccaaccagtatcaatgtatagaccttatttgaaaacatgagactgacagtaggggaaatctgaacacttgactcattatgttatcattatcatgggtatgttttctctaaatagaattcacagcttttaaaaattaatgctgtgctggacgtggtggctgacgcctattatcccagaactttcggaggccaaggtggactgatcactttaggccaggagtttgagaccagtaaggccaacatggtgaaaccatgtctctactaaaaatacaaaattatccatgtgcagtggcacatacctgtagtcccagctacctgggaggctgaggcatgagaactgtctgagtctgggaggtggaggtcgcagtgagcgaagatcgagccactgcactccagcctgggttacagagccagaatctgtctccaaagaaaataaaaacattaatactgacaggccaggcgtggtggctcactcctgtaacctcagcactttggaaggctaaggcatggggccaggacttcaaggacagcctgagcaacatagtgagaccccatctaccaaaaataaaaattagctgggtatggtggtgcacacatgcggtcctagctagtgagaaggctgaggcgagagtattgcataagcccaggtgtttgaggtcacagtgagctatgatggcaccaccactgaactccaccctgtctccaccttccaccccccaaaaaaatgtctgagatttgcttcacttagagtaaaggtgtaaatgaaacaaaattcaccatgggttgatacttctgcaattaggagaggctgcatagaagtgtactgcatattttcaggactcaaaaaagctactgtttacctgggtttcatatacacattgatatttaccatactagaaattaaaacaaatttcatattaattcatttagaaaattatacaatcattacatgttaacagaaataaaatttttatgaaaattgtattttacacattgaaaaaactgtgagaaaagtggcactgctttccacttctgcaaaagtctttaatatctggcttaacgggagtcaacacagttctcataactcaattcaatctgatgcaatatcacatatcatgtagtatctggaaagccccactgcacatttgtgagaaaatgaagacaataatgtctcagtttttaccatggtactacttttcgccttggaaactcccaggaagggactatgatctagggatccctagatgacagtttgagaaccgctgtgatggagcaaagtctatggcggtaaataagaatttccttgacttagcaagatttctacgatcctctttactctggtgaaatcaaagtcccaagttgacaaaaagaacatcatgtcacccctgaacaccctcctgcacaccacaccatcatgaagaaagggtctctgtagtatggactggtcaaagtacccttagacattcccacagctaaattcaggacaagctgtgaatgttcaagatgtacttctagaccgctgatccctaataggaaatcaatatgctgggtctcttgacaagcaattttcttttaaattaaatagggggaaaaaaaggatagattacaatataacacggagagtgaggctaagctgaaattgtttcagttgtgtgtgtgcacacacacaggtagccacaaatactgggtctcaattcgaaagttcttattgcaaataaaagtcaaaattaacaacaacacaattccctcaggtacaaggtacagattataaaagtctttataaagaaagaaaatgggaagaaaaaccatgtttgaagaggaagtaaaggtggtgactaaattaagttaaaaaaatcaagttttgaaattgtggtatggtcctcattaaagaaaaaaaaagaaattataaacacatacgaatacacagaaaaactctaaaagcatctcctccagcaagggatttaggcaggcttgagtgcaacttattactttattcctttcagggctgttgaaattctttgacaaagggcagggaatgctttcagagtttaaaacaacaacaacaaaagacattcttttcttttttttttttttaataacaaaaccacctctgacccgtactttgctccaaacaaatattaactcaaaaagcagttggcgggagcggtggctcacacttgcaatcccagcactgtgagaggccgaggcaggaggatcacacttgaactcaggagtttgcaaagtgcctggaaaataaagcaaggctacaaaactaccaaaaaaaaaaaaaaacacaaaaatcagccaggcgtggtggtgcacgcctgtagtaccagctacttgggaggccaagacaggagaactgcttgaacccagaaggcggaggcggagattgcagtgaacctccagcctggttcaaagactgtcttttaaaaaaaagaaaaagaagaagaaaaaggaggggggtcatagtgctcaccttggcagctcatatattaaaactggaacattacacagaagataacacggcccccgtataaagatgacatgcaaattcgtgaagcttttctttttaaagtgatc

SEQ ID NO: 53 - DNA, 1823 bp, Homo sapiens
cccccaatttcccagctgctaaaggaagaggaaggtacctgtgcgtgcacgcagacgggaagggctggggaagcgggaggactgagaaaaccagatcttagcaaagcaatgtctcaagatggtgcttctcagttccaagaagtcattcggcaagagctagaattatctgtgaagaaggaactagaaaaaatactcaccacagcatcatcacatgaatttgagcacaccaaaaaagacctggatggatttcggaagctatttcatagatttttgcaagaaaaggggccttctgtggattggggaaaaatccagagaccccctgaagattcgattcaaccctatgaaaagataaaggccaggggcctgcctgataatatatcttccgtgttgaacaaactagtggtggtgaaactcaatggtggtttgggaaccagcatgggctgcaaaggccctaaaagtctgattggtgtgaggaatgagaatacctttctggatctgactgttcagcaaattgaacatttgaacaaaacctacaatacagatgtccctcttgttttaatgaactcttttaacacggatgaagataccaaaaaaatactacagaagtacaatcattgtcgtgtgaaaatctacactttcaatcaaagcaggtacccgaggattaataaagaatctttacggcctgtagcaaaggacgtgtcttactcaggggaaaatacagaagcttggtaccctccaggtcatggtgatatttacgccagtttctacaactctggattgcttgatacctttataggagaaggcaaagagtatatttttgtgtctaacatagataatctgggtgccacagtggatctgtatattcttaatcatctaatcaacccacccaatggaaaacgctgtgaatttgtcatggaagtcacaaataaaacacgtgcagatgtaaagggcgggacactcactcaatatgaaggcaaactgagactggtggaaattgctcaagtgccaaaagcacatgttgacgagttcaagtctgtatcaaagttcaaaatatttaatacaaacaacctatggatttctcttgcagcagttaaaagactgcaggagcaaaatgccattgacatggaaatcattgtgaatgcaaagactttggatggaggcctgaatgtcattcaattagaaactgcagtaggggctgccatcaaaagctttgagaattctctaggtattaatgtgccaaggagccgttttctgcctgtcaaaaccacatcagatctcttgctggtgatgtcaaacctctatagtcttaatgcaggatctctgacaatgagtgaaaagcgggaatttcctacagtgcccttggttaaattaggcagttcttttacgaaggttcaagattatctaagaagatttgaaagtataccagatatgcttgaattggatcacctcacagtttcaggagatgtgacatttggaaaaaatgtttcattaaagggaacggttatcatcattgcaaatcatggtgacagaattgatatcccacctggagcagtattagagaacaagatagtgtctggaaaccttcgcatcttggaccactgaaatgaaaaatactgtggacacttaaataatgggctagtttcttacaatgaaatgttctctaggatttaggcactaaaaggtactttactatgttactgtaccctgcagtgttgatttttaaaatagagttttctgcagtatgcttttagtctaagaaaagcacagatggtgcaatactttccttctttgaagagatcccaaagttagttactcttaagtgc

SEQ ID NO: 54 - DNA, 6356 bp, Homo sapiens
gccttcgccgccgttggggctggaagttcccgccaggtccgtgccgggcgagagagatgctgcccggcccgcctcggctttgaggcgagagaagtgtcccagacccatttcgccttgctgacggcgtcgagccctggccagacatgtccacagggttctccttcgggtccgggactctgggctccaccaccgtggccgccggcgggaccagcacaggcggcgttttctccttcggaacgggagcgtctagcaacccttctgtggggctcaattttggaaatcttggaagtacttcaactccagcaactacatctgctccttcaagtggttttggaaccgggctctttggatctaaacctgccactgggttcactctaggaggaacaaatacaggaatagcaacaactataactacaggattaactctgggaacgccagccactacatctgcagctacaacaggcttcagtttaggattcaataaacctgcagcatctgccacaccatttgctctacctattacctctacctcagctagcggtctgactctttcgtctgctctgacatcaactccagcagcatccacaggatttactctaaataatttgggtgggacaacagccacaactacaactgcatcaacaggcctctctttagggggagccttagctggtttgggaggttcacttttccagagtacaaacacaggaacatcaggacttggacagaatgctttagggttgactttgggaactacagcagctacttcaactgcaggcaatgaaggccttggtggtatagatttcagtagctcctcagataaaaagagtgataaaacgggaacaagaccagaggatagtaaagctctgaaggatgaaaatctacctcctgtcatctgccaggatgttgaaaatctccagaaatttgtgaaggagcagaaacaagttcaagaagaaattagtagaatgtcttcaaaagcaatgcttaaggtacaagaagatattaaagctctgaagcagctcctgtcgttggctgccaatggaatacagagaaacactctcaacattgacaaattgaaaatagaaactgctcaggagttgaagaatgctgaaatagctttaagaacccagaagacaccacctggacttcaacatgaatatgcagctcctgctgactacttcagaatcttggttcagcaatttgaggtacagcttcagcagtacaggcagcagattgaagaactagaaaaccatcttgccactcaagcaaataattcacatataacccctcaagatttgtcaatggctatgcagaaaatttatcaaacatttgtagctttagcggcacaacttcagtctattcatgaaaatgtaaaggttctgaaagaacagtaccttggctacaggaaaatgttcttgggagatgctgttgatgtgtttgaaacaaggcgagcagaagccaagaagtggcagaacacacccagagttactactggacccactcctttcagcaccatgccaaacgcagcagccgttgccatggctgcaacacttacacagcagcaacagcctgctacaggtctgaacgcattcaagttatagcttcttactgttccaatgcagaacatttatgtgcgtttttataagtcttccatttgtgtgagcactgaagaaatttctatgagtagctgttccaatacaatctaaaattgtgatggacacgattataaacatacctgataaaaaaggcagggtagtcttagcaataattatacatcaattagatattgaatattgtgaatctacttaatgttatttgctgtaatgctataaatgccctttagaacatggtgtttcactagtgaattacatttaagaataacattagattctgaaatcatgactgtaccatttattgttttaaagtcagagatcatccatccattctttgaatttttcatatatgatactgataggtggtgcattctcattttcctcatacatagtgattacaaagtacccacattcaggatgaagtatgcttttattgactgaaggtatgttgaagatcaataggcttgtttgtatgtatgttgactgtaaacagaatacaagccctctaaaccaaattttgaagatgatacatgctagaattgtacctttccaaggtgaacagaacagcaagagcaggaaaaagatgttttgagatgtggattgcacattaaggagcaactgggaagttgaacagatgaaaataattggtgacatggaaagcagattgttttatttcttggtttagttacacttctaattagagaaacattttttgtggtcattctacagtgttttatttggtcctgtgtctttcggaggttaatagttatcttaatcctgccatcccttttgtcaggtttgaagcttgacatggaaaaatagtcttaatcgatattgatttttttattttaatcattcataaatttcttagtaatgcttactattcaatagcatgtgtctttctgagagttccatatagtccagtagtacattataatacacacaaattaatacatatttagattgcattcaagctacctatactagggaagcattctctggttttcactattggcagtttaaaaaattgttcttcacatttggagatgacagaattgacttgccataagtaaagggttgatgatagatttatgccaaatcctccatatcccgtggctggacccatgtgaatagtggctcgcacgagcactgtctggtagctctctagctggctggagtgtaggattgcgttgttaagttatggagggaaaaagtcattatgggattgattcctttgaggattgatatttcttcttaaaaggattcaatcccataattatgaccatcagctctcatgattacctaaccagttaatcaaaccaaccatagtactagtttactttttagagccagtattaatcctaaagtagataagtgtagatttggttaagtgttctttaaacatagtgaatttccattctattaaatagaacttgagaaatgtcagttatataaaaagttatgttgtaagtgaatatattctatgataaatacctaaacttgaagcaaaatctcctgtcaagggtttgtgtgtgtgtgtgtgtttaactttcttatctatagattattattttgagaaattcataggttttcacttatacattttgagcttgtggacatatggagatgtgtgttcattctctaaatgagtgcctactatgtgctgggctcgaggaatacaaaggtagacaatatagattttgtctttgccctctgtggtggttgacaatgttagcttaatctggagtattcttgaggagccttttgctcataggctttaattttgtctgtgacttttgccaggctttggggaaattgactgccttcactcttccctgaaactttgaagtccacataagggctttctcatcagatggcagaaattataatttattaacctaaacaaccttacagtgttttcgctttgaattgtatgaattcttagaactgagaagctaaacaacagtgataacaattttacattatcttttctttctccttttgtttctctaaaggtctcccaggccttcccagtcaaaattttcgttatttttagtcatgtcaccatgatgtgagatttctgagctctgttagatacatttagaaatgtccctatttatcaaatggtgttttgtaccccataagttatcccttatgccctgtgacttctgtgaaatctttgtttttaagtgccagtaacaaattttagaccatctagatgagggtagagagagcttatgcattgtttttatacatcactgttgatctatacaagatttgagttatcagaagggttttgcttttatttgcatatgaaatttttattaacatgaatatgggcacagagcaaatagcttcttagactgctgccttctgaaggtggcttctgtatctttctcagaggaggaggaatagacttaaacgacttctttgtcctccttcaattttttttttaatgaaaaagtatactagggcttaggcatgtgtgatttacagttatttgttctgaaggctgcagagaattgaaaatccagcaggctatttgtgtatgaaatcatgagcatcgataacgtggataacgtagttccatgttggcagaacttgacacttgtctataagtgcttcccaagcctcctgaaaaactgaagacatttacattaggcttttcagtataattttaatttaggataggttttttagcaatgtatctgggattgagttttgctattgtgttttgacactttaagagttcttgatgtttacataataagactttcttatgtgacttagctgctgttttaaggagagccaagacgttttgttaggaattcctaatttttagcttagtgtaggtttggacatttaaggtgtagtgttaaataggaaacattaagtatttcatcttagtttcttgtggttttgtgattttgttgtatttaataaccaaaggaacattccccattaaatcagtaagagtaaaatttttcaaactggggaaaacgcattttaggttttttaaagaaaaattattttaaaatgtgacttagaaataaccatactaattacattaggcatttggggtgatcatggaaaattataaaatatttttagcactttagtcctttttctgttaatgcagttttacttttaagaaagtaaaatttattctggaaaatatgaattacagcgctaaacctggttttgttgtgtgtgaatatattatatggtaacttttgtaaaatgttactctacatgaagatttcactttggccagtcattggtatatatcactacaaacttaattttatttatggaaataagaacctctcattggatgactattcaaatttcaaagcagacttcttgaattgtttacgtaacttttgcctgaaggatttagactgctttctaatagtgaaactaatatatatggtggccagagtgtaatatatgctaatactttggcatgggagatatttatcatgagtttttactattaaaaaatgttatacatttgcctacgagttttataaatgatgttgccttcagaatttgtgtgaaggtacaaaactaaaaatatcatgtatctgatgtgcaatggaaagtcttgtcatcattagatatgagttcttgattatattctgaatattgatgattagaaaaatcttatgttctgtcgctcttaacaacagacccacacacaacaaaaagcatgctatttgagtaactcttacgacttacaaggctgagggctgtggtgtgcattattctttagggtcttccaccagcagtgcctcctattaacctgtgacaaacaagtctctcaatgttaaagaactggacatgtgttttttatgttttttgttaggaatcagaaagtataataatatgcttggtttctttttcctatagtaacattttacaaaagagctgctaggcaggtattttattctcaaagtgatctcaaactggatgtaaaattttaaattatttttttaatagtagtataagaattctggctgctattagttattgtttgttttctgggttagaagctattcgaaaagtccagtttctgtcccagtgtagcaaaatgtagttcctcggttgtttttctttaaatgctttataattttacactacctttttaatatacaaacctcattcttcattggataacttgaaggctttgatttctttaaaaatttaaattttagtgtgtatattactttgacagttccctcatctttgagatgcactgatcactgtgcttgaaaaagacaatactgaagattgtactatgaagtttattgaataattttcataaattatttatccaaatgagagatttttagatttttgtattctgcttagttttaaaaaaaaaaaatagtagtttaaaagagaggctagtaagtttgatgctattcttgccaaacaaactcagccaaaatctttaaagtaacaagagggaaaaggatgactaatcgttctgcttctgagtacattttccaaaacgttggaaagaaacttctgaattgaaatcttgaatgtattgaatctgtcaaggtacacagcggtgcctttgtaaatgttcattactttatttaatcaggtgataagtggtgtaatgtagcagagcttaagaatagaactcaattatcactttttgtgaacaagttggaattgtcatgttactgtgtaattgatttgctttacaatgaacaataaatttaataaaat

SEQ ID NO: 55 - DNA, 344 bp, Homo sapiens
ggatgacctcgtcaactgggcccgccggagttctctgtggcccatgaccttcggcctggcctgctgcgccgtggagatgatgcacatggcagcaccccgctacgacatggaccgctttggcgtggtcttccgcgccagcccgcgccagtccgacgtcatgatcgtggccggcacactcaccaacaagatggccccagcgcttcgcaaggtctacgaccagatgccggagccgcgctacgtggtctccatggggagctgcgccaacggaggaggctactaccactattcctactcggtggtgaggggctgcgaccgcatcgtgcccgtggacatctacatcccag

SEQ ID NO: 56 - DNA, 459 bp, Homo sapiens
tttttttgatgcacgtggagctctttatttgcttctgatatgtacaggtatatacagttggtgagagtctatggtacattatttcacaaaattatcttacatctgtgcacactcctgggcaagaagtggcagattctgcccctaatatcccatagatggtgaaggaaaaggatgctaccaggagccaccatacaggtaactgggcagtgcaaaaggcccctccaaaactgggactaacaagaagccacaggaggtggtttccgatgccaaccttggaccatctcgaagagtactgctgcggtcaccgccatccagtgcagcttgatctcaaaggctgcattcagagaaaagttgccatggtaataacagctgcaccactccagccggtctgtgcggttgttcacgtcaacatccagggtcacagtcctctgctctgggacagtggcagctaaaagtgct

SEQ ID NO: 57 - DNA, 555 bp, Homo sapiens
actcaaagcctcctgcctatacgggcagctccccaagttccaggacggagacctcaccctgtaccagtccaataccatcctgcgtcacctgggccgcacccttgggctctatgggaaggaccagcaggaggcagccctggtggacatggtgaatgacggcgtggaggacctccgctgcaaatacatctccctcatctacaccaactatgaggcgggcaaggatgactatgtgaaggcactgcccgggcaactgaagccttttgagaccctgctgtcccagaaccagggaggcaagaccttcattgtgggagaccagatctccttcgctgactacaacctgctggacttgctgctgatccatgaggtcctagcccctggctgcctggatgcgttccccctgctctcagcatatgtggggcgcctcagtgcccggcccaagctcaaggccttcctggcctcccctgagtacgtgaacctccccatcaatggcaacgggaaacagtgagggttggggggactctgagcgggaggcagagtttgccttcctttctccag

SEQ ID NO: 58 - DNA, 524 bp, Homo sapiens
ttcgtgacactagaaattggaaaacaactaattaaagcacagaaaggagcagcatttctttctattactactatctatgctgagactggttcaggttttgtagtaccaagtgcttctgccaaagcaggtgtggaagccatgagcaagtctcttgcagctgaatggggtaaatatggaatgcgattcaatgtgattcaaccagggcctataaaaaccaaaggtgcctttagccgtctggacccaactggaacatttgagaaagaaatgattggcagaattccctgtggtcgcctggggactgtagaagaactcgcaaatcttgctgctttcctttgtagtgattatgcttcttggattaatggagcagtcattaaatttgacggtggagaggaagtacttatttcaggggaattcaacgacctgagaaaggtcaccaaggagcagtgggacaccatagaagaactcatcaggaagacaaaaggttcctaagaccactttggccttcatcttggttacagaaaagg

SEQ ID NO: 59 - DNA, 363 bp, Homo sapiens
cctcactgaggtggtatgaagattcactaatgtatgtagcgtgtttgtcaatcctccagtgaaaagcactatctagatcacattttggatcacattagccaaatgcagtaaatggccaaattagatgtgtgctgaagacaatcagtcactgggtctatattaaacagcaaccagagcaacaaatggcaaacaatttctattttcaagtttctttgcatatttttttggtgcaaaaccatttataaacttttttttctaacactagtgtctacagcagcattcaaaaaaattctgttaccttttctgtattaggatttaaagtctatttcttattgtatacctgattgaagctgttcttggaga

SEQ ID NO: 60 - DNA, 389 bp, Homo sapiens
gccaatcagatggtcaagtgtgaccctcgccacggcaagtacatggcctgctgcatgttgtacaggggggatgtggtcccgaaagatgtcaacgcggccatcgccaccatcaagaccaagcgcaccatccagtttgtagattggtgcccaactggatttaaggtgggcattaactaccagccccccacggtggtccctgggggagacctggccaaggtgcagcgggctgtgtgcatgctgagcaacaccacggccatcgcggaggcctgggctcgcctggaccataagttcgatctcatgtatgccaagcgggcctttgtgcactggtacgtgggagaaggcatggaggagggggagttctctgaggcccgcgaggacctggcagctct

SEQ ID NO: 61 - DNA, 576 bp, Homo sapiens
tgctgcgaaccacgtgggtcccgggcgcgtttcgggtgctggcggctgcagccggagttcaaacctaagcagctggaaggaaccatggccaactgtgagcgtaccttcattgcgatcaaaccagatggggtccagcggggtcttgttggagagattatcaagcgttttgagcagaaaggattccgccttgtgggtctgaaattcatgcaagcttccgaagatcttctcaaggaacactacgttgacctgaaggaccgtccattctttgccggcctggtgaaatacatgcactcagggccggtagttgccatggtctgggaggggctgaatgtggtgaagacgggccgagtcatgctcggggagaccaaccctgcagactccaagcctgggaccatccgtggagacttctgcatacaagttggcaggaacattatacatggcagtgattctgtggagagtgcagagaaggagatcggcttgtggtttcaccctgaggaactggtagattacacgagctgtgctcagaactggatctatgaatgacaggagggcagaccacattgcttttcacatcca

SEQ ID NO: 62 - DNA, 479 bp, Homo sapiens
  misc_feature (441)..(441): Each "n" represents a nucleotide selected from a, t, g or c, or contains no nucleotide.
cggctcccctgaggaaacagcaaataatttgggcctcagaggcacagactcttgggttccttatgacctggtgcctgacggagaaagaagtgcgccgccgttttactgtctggaaaatgggttgcaggcggaacagaaaggctgcggcgaataggagcggaccagaccctggtgtaggggtcttctggatgctttagagacttcgtgccttcccggttcccattccctgctcctttggacgagaagggaactagtatttatttaactttaatcaggccgggtttggtggctcacgcctgtaattcccagcactttgggagacggagatgggcggatcacttgaatccagcagttcgagaccagcctggccagcatggcaaaccccgtctctgctgaaaatacacaaattagctgggcgtggtggcgcgcgccactcccggngctgaataaagagaatcgcttgaacccagaaggtggag

SEQ ID NO: 63 - DNA, 485 bp, Homo sapiens
  misc_feature (2)..(482): Each "n" represents a nucleotide selected from a, t, g or c, or contains no nucleotide.
cntcaggtctaaagtgtttaattatcactcacatatttcacaggaaaaggaatgtagcaaatgggtcaaggtggtataaaaaaaaaatccaggtttgtacatgtctctctgtttacatctgggagaaaggttgtcctggcatcagtcgcagcagctgcacttctctgacgcccctttgcaaacacagccctgggcacacttgctacagcccacggggcagcaggagcagcagctcttcttgcaggaggtgcatttgcactctttgcacttgcagggaaccagcgcaggtgcaggagacacctgggaggaaaggaggaaaaaaaaagccagtgagncggcgagttgacctgcaggagggtacaggcagtgagttnaatgagtctnccttggccccctcctttgtggcggggggccagcccttnaggagtttcntttcccattcagaggnagagggaggnggaggcccttgtncttttnccttnaat

SEQ ID NO: 64 - DNA, 5050 bp, Homo sapiens
cgaaggggggtgggccgggggaggggaggttcgttccgcggagcgcagccagaaccgggaccaagaatcgccttcagccctgtctggtgcatccttggcagaaagtgaggaggaaaacacccccattgttagatgaggtcttaatcatggaacatttgaagtcacgtaaagaaggttctttggcatggacacaagttcagtgggaggattagaattgactgatcagactcctgttttattagggagtacggccatggcaactagtctcacgaatgtaggaaactcatttagtggtccagctaatcctttagtgtctagatctaataagtttcagaactcgtcagtggaagatgatgatgatgttgtttttatcgaacctgtacaacctcccccaccttctgtaccagtggtagctgatcaaagaaccataacatttacatcatcaaaaaatgaagaactacaaggaaatgattccaaaattactccttcctcaaaagagttggcatctcagaagggaagtgtaagtgagacaattgtcattgatgatgaagaggacatggaaacaaatcaagggcaagagaaaaattcctccaattttattgaacgaagacctcctgagactaaaaacagaaccaatgatgtggatttctccacttccagtttttcaagaagtaaggtaaatgcaggaatgggtaatagtggtatcaccacagaaccagactctgaaattcagattgctaatgttacaactttagaaacaggtgtaagctctgtgaatgatggccaattagaaaatactgacgggcgagatatgaacttaatgattacacatgtaacatcactgcagaataccaacttgggagatgtctctaacggactgcagtcaagtaattttggtgttaatatacaaacatacaccccatctttaacttcacagaccaagactggagtaggaccttttaatcctggtagaatgaatgtggcaggagacgtttttcagaatggagaatctgcaactcatcataatcctgattcttggatctcccagtcagcttcatttccccgtaatcagaaacaaccaggggtggactctttatcaccagtggcctcacttcctaaacagattttccagccgtctgtccaacagcagcctactaaaccagttaaagtcacttgtgcaaactgcaaaaaacctttacagaagggccagacagcttatcaacgaaaaggatcagctcacctcttttgttctaccacctgcctttcttccttctcccacaagcctgctccaaagaaactctgtgttatgtgtaaaaaagatataactacaatgaaaggaaccattgttgctcaagtggattcaagtgagtccttccaggaattctgtagtacatcttgtttatctctctatgaagacaaacagaatcctactaaaggagctctaaataaatcaagatgtacaatctgtggtaaactaactgagattcgccatgaagtcagctttaaaaatatgactcataagctgtgcagtgaccactgctttaatagatatagaatggccaatggtttaataatgaattgctgtgaacagtgtggagagtacttgcccagtaaaggtgctggaaataatgttctggtgattgatggtcaacagaaaagattttgctgtcaaagttgtgtcagtgaatacaaacaggtaggtagccatccaagcttcctgaaggaggttcgagatcacatgcaggactctttcttaatgcagcctgagaaatatggaaaactgacaacttgtactggttgccgaacacagtgcaggttttttgatatgactcagtgtataggtcctaatggatatatggagccatattgttcaactgcttgtatgaacagtcacaagacaaaatatgcaaaatcacaaagtttgggaattatttgccatttttgtaagcgaaactctttacctcaataccaagccacaatgcctgatggaaaactgtacaacttttgcaattccagttgtgtggctaaatttcaggctctaagtatgcagtcatctccaaatggccagtttgtagcgccaagtgatattcagttgaaatgcaactactgcaaaaattccttttgttcaaaaccagaaatcctggaatgggagaacaaagtgcatcagttctgcagcaaaacttgttcagatgactataagaagttgcattgcatagttacatattgcgaatactgtcaagaggagaagactcttcatgaaacagtaaatttctctggcgttaagagacctttctgtagtgaaggctgcaaattattatacaaacaggattttgccagacgtttaggattgagatgtgttacttgcaactattgttctcagctatgtaagaagggagcaactaaagaactcgatggtgttgtgagagatttctgcagtgaagattgctgtaaaaaatttcaggattggtactacaaggctgcaaggtgtgactgttgtaaatctcaaggaactcttaaagagcgagttcagtggcgtggggaaatgaaacatttctgtgatcaacattgcttactgcgtttctactgtcaacaaaatgagcccaacatgacaactcagaaaggacctgaaaacttacattatgatcagggttgtcagacatctcgaaccaaaatgacaggttcagcaccacccccttctccaacacctaacaaagagatgaagaacaaagcagttctttgcaaacctttaacaatgacaaaagctacttactgtaaacctcacatgcagaccaaatcttgtcagacagatgatacttggaggacagaatatgttccagtgcctatccctgtgcctgtgtatatcccagttcctatgcacatgtacagtcagaatattcctgttcctactacagttcctgttcctgtgccagttcctgtttttctgcctgctccattggacagcagtgagaagattcctgcagcaattgaggagctaaaaagcaaggtttcttcagatgctcttgatacagagttgcttacaatgacggatatgatgagtgaagacgaggggaaaacagagacaaccaacatcaacagtgtaattattgaaacagatataattggttcagaccttttgaagaactctgacccagagacacagtccagcatgcctgatgtaccatatgaaccagatttggatatcgaaatagattttcccagagctgctgaggagcttgatatggaaaatgaatttttattaccacctgtttttggcgaagaatatgaggaacagcccagacctcgatctaaaaaaaagggagccaagagaaaggctgtatcaggataccagtctcatgatgatagttctgacaattcagaatgcagctttcctttcaaatatacgtatggcgtaaatgcatggaaacactgggtcaaaactaggcaacttgatgaagatcttctggtattagatgagttaaaatcttctaaatcagtaaagttaaaagaggatctactctctcacaccacagctgagcttaactatgggttagctcattttgtcaatgagatccgacggccaaatggagagaattatgcacctgacagcatctattacctttgccttggaatacaggagtatttgtgtggaagtaatcgaaaagacaacatatttattgatcctggataccaaacatttgagcaagaattgaataaaatactgcgaagctggcaaccaagcatacttccagatgggtcaatattctctcgagttgaagaagactatctctggaggataaaacaactaggatcacactctccagtagctcttctgaatacactgttctactttaacactaagtattttggcctgaaaacagtggaacaacacttaagactttcctttggcactgtgtttaggcattggaaaaaaaatcctttaacgatggaaaacaaagcgtgtcttcgataccaagtgtcttccttgtgtggaacagataatgaagataaaattactactggaaaaagaaaacatgaagatgatgagccagtatttgaacaaattgaaaacacagccaatccttccagatgtcctgtgaaaatgtttgaatgctacttgtctaaaagtccacagaatcttaatcagaggatggatgttttttatttgcaaccagaatgctctagttctacagatagccctgtctggtatacgtctacttcactggaccgaaacaccttggaaaatatgcttgtacgggttcttctagtaaaagatatttatgataaagacaattatgaactggatgaagacacagactaaaaaggaacgttgcagaagcaatcgggataaaacagcattagatagtcatgctgctagatctttattatggaaaacatttcaagtttactccttctgttttgagttttgtagcagtgtacccacgctgggtattaccatgtaaataatctgtgagtgaaagttgccattattctatgtagtggttttaggatacttaacaaatacattcaaattctttttttattattatttatttgattaggtatgtttgtaactttttacattacagaatatgaatgagaatgtgccatgtataatttttttcttgtagtaagaaacatccatattgcacaactctactgttgcaaagcttccttggaagggggctcttttactgggttcttaaccagatggttgtgtatgggtagcactactaaaagtttagaacttgcagtgtctttcggaatttttaaaataaactgtaaactaataggctggggtttttgttttgttttggggttttgttttgtttggttttacattttagttactgaagccttacaaggttatgtagagagataccatcttctgtaccaaaaatagacaagagaatgctgtcaatattggtgtactgtaatgtgaatctatgctggtgaaaacaattttttgttccccttattaaaaccttagtgtccttttctcatttgtggctttctgcatcacccaatcaataaaaaacaaatatatatatgt

SEQ ID NO: 65 - DNA, 2060 bp, Homo sapiens
cacccgcactgcagtctccagcctgagccatgggccgccgagccctcctgctcctgcttctgtcttttctggcgccctgggccaccatagccctccggccggccttaagggccctcggcagcctacacttgccaaccaaccccacatccctcccggctgtagccaagaactattcggttctctacttccaacagaaggttgatcattttggatttaatactgtgaaaacttttaatcagcggtacctagtagctgataaatactggaagaaaaatggtggatcaatacttttctacactggtaatgaaggggacattatctggttttgtaataacacggggttcatgtgggatgtggctgaggaactgaaagctatgttggtgtttgctgaacatcgatactatggagagtctctcccctttggtgacaactcattcaaggattccagacacttgaatttcctgacatcagaacaagctctggctgattttgcagagttaatcaaacacttgaaaagaacaatcccaggagctgaaaatcaacctgtcattgccataggaggctcctatggtggcatgcttgccgcctggtttaggatgaaatatcctcatatggtagttggagctcttgcagcttctgcccctatctggcagtttgaggatttagtaccttgtggtgtatttatgaagatcgtaactacagattttaggaaaagcggtccacattgttcagagagcatccacaggtcctgggatgccattaatcgactctcaaatactggcagtggtttgcagtggcttactggagcccttcacttatgcagcccattaacttctcaggacatccaacatttgaaagactggatctctgaaacctgggtgaatctggcaatggtggactatccttatgcctctaactttttacagcctttgcctgcttggcctatcaaggtagtgtgccagtatttgaaaaatcccaacgtatctgattcactgctgctgcagaatattttccaagctctgaatgtatattacaattattcgggccaggtgaaatgcctgaatatttcagagacagcaactagcagtctgggaacactgggttggagctatcaggcctgcacagaagtagtcatgcccttttgtactaatggtgtcgatgacatgtttgaacctcactcatggaacttaaaggaactttctgatgactgttttcaacagtggggtgtgagaccaaggccctcctggatcactactatgtatggaggcaaaaacattagttcacacacaaacattgttttcagcaatggtgaactagacccctggtcaggaggtggagtaactaaggatatcacagacactctggttgcagtcaccatctcagagggggcccaccacttagatctccgcaccaagaatgccttggatcctatgtctgtgctgttagcccgctccttggaagttagacatatgaagaattggatcagagatttctatgacagtgcaggaaagcagcactgagaaacttttgattgttttcaatttcttcttttatgttcacaccaccacattcccattcactttgattttctacatgtaattaccttcttttgtttatcattagatttgatggggccaaagttgagatagaatagagggtgatgacggtaagagcaagtgtcccatgaatgtgatttcctgggttctcactgtctttgcaccacgtctaggaagaatcttcttgatagctctcccacaccatcagtggccctcataactggagtagagttcctggttgcttttcataagagggagagttactttctttgtatctctgcaagcagagatttctctttggttttgaggttgaagtgtctttggcccatttgtaagtccccatccctaccctacacaaagtaaaagcagaagatagataaaaaatgatgtaattgcagctggtaggatgtctggtgcccaatcccaggaagtgagagccatttcttttgtactggatttaatgactttgaactgtgctgtaaataaataatacagctggacctt

SEQ ID NO: 66 - DNA, 1863 bp, Homo sapiens
ggagcttaccatctttatcctgagactggccatttacatcctgacatttcccttgtacctgctgaactttctgggcttgtggagctggatatgcaaaaaatggttcccctacttcttggtgaggttcactgtgatatacaacgaacagatggcaagcaagaagcgggagctcttcagtaacctgcaggagtttgcgggcccctccgggaaactctccctgctggaagtgggctgtggcacgggggccaacttcaagttctacccacctgggtgcagggtgacctgtattgaccccaaccccaactttgagaagtttttgatcaagagcattgcagagaaccgacacctgcagtttgagcgctttgtggtagctgccggggagaacatgcaccaggtggctgatggctctgtggatgtggtggtctgcaccctggtgctgtgctctgtgaagaaccaggagcggattctccgcgaggtgtgcagagtgctgagaccgggaggggctttctatttcatggagcatgtggcagctgagtgttcgacttggaattacttctggcaacaagtcctggatcctgcctggcaccttctgtttgatgggtgcaacctgaccagagagagctggaaggccctggagcgggccagcttctctaagctgaagctgcagcacatccaggccccactgtcctgggagttggtgcgccctcatatctatggatatgctgtgaaatagtgtgagctggcagttaagagctgaatggctcaaagaatttaaagcttcagttttacatttaaaatgctaagtgggagaagagaaaccttttttttggggggcggtttttttggtttgttgttggttttttttttttttttggcgggaagagggagttttgctcttgttgcccaggctggagtgcagtggcgtgatctccgctcactgcaacctccacctcgcgggtttaggcgattcttctgcctcagcctccctggtgcctgtggtcccaggtacttggggggctgaggcaggagaatctcttgaacccagaaggcgaaggttgcagtgaaccgagatcgtgccgttgtactctggcctgggtgacaagagcaagactccgtctcaaaaaaaaaaaaaagaaaaaaaaagaagtagagacagggaggcggggtctcactgtgttgcctaggccggtcttgaactcctgggctcaagtgattctcccaccttgacctcctaaattgttgggattacaggtgtgagacagtgcacctggccgaaatagctcaagtttctgaaaaacaaatctgaatctatttgttattcttagcgtcactggtctggctttcagaattaacatacaaggttgccacacctagttctgcccagctttatgtcttttattccagtattccaccaaagtttgttttcctgcattccagttctcaagtcttaagataaagattgtacttgacagtttagtatatccataaaactatttgaggtggttaaggttcttgggttcattttccttaatactttgctgaatattgtagattgtaggcaatgaaaaagtctactaaattaggaaaaccttgaataattaggtatcctaggtaagagcccctaaacatcaagcaatctgtgagtctgtaaagaaataaatattttttggattattcttatctaattccacccctgttggaagatgatttctttgttctttgcaactatggaagctgtgaaaatcatcacaagtgcctctgaaagcgagtgttaggttggttagagggtttaatattttctgcaatggtttgtaggaattttaataaatgtagtatattttctgagaaaaaaaaaaaaaaaaa

SEQ ID NO: 67 - DNA, 2736 bp, Homo sapiens
gagagaagccttttccgttgccggtgccggcctagcgtcctggaattacttcaatcaacaggagcgagaacccgagcagcgccatgagcaacactaccgtcgtccccagcactgcaggtccgggccccagcggcgggcccggtggcggaggtggtggtggcggcggaggcggcggcaccgaggtaatccaggtgactaatgtctccccgagcgctagctctgagcagatgcggactctcttcggtttcctaggcaagatcgacgaactgcgcctcttcccgccggatgattcgcctttgccagtctcatctcgtgtctgctttgttaagttccatgatccagactcagcagttgtggcacagcatctgacaaacactgtattcgttgacagagctttgatagtcgtaccatatgcagaaggagttattcctgatgaagctaaagctttgtctctgttggcaccagctaatgcagtggcaggtcttctgcctggtggtggactcctgcctactcctaacccacttacccagattggcgctgttccactggctgctttgggggctcctactcttgatcctgcccttgctgcacttgggcttcctggagcaaacttgaactctcagtctcttgctgcagatcagttgctgaagcttatgagtactgttgatcccaagttgaatcatgtagctgctggtctcgtttcaccaagtctgaaatcggatacctctagtaaagaaatagaggaagctatgaaaagagtacgagaagcacagtccctaatttctgctgctatagaaccagataagaaagaagaaaaaagaaggcattcaagatcaagatcacgttctaggaggaggaggactccctcatcttctagacacaggcggtcaagaagcagatcgagacggcggtcacattctaagtctaggagtcggcgacgatccaaaagcccaaggcggagaagatctcattccagagaaagaggtagaaggtcaaggagcacatcaaaaacaagagacaaaaagaaagaagacaaagaaaagaaacgttctaaaacaccaccaaaaagttacagcacagccagacgttctagaagtgcaagcagagagagacgacgacgaagaagcaggagtggcacaagatctcctaaaaagcctcggtctcctaaaagaaaattgtcccgctcaccatcccctaggagacataaaaaggagaagaagaaagataaagacaaagaaagaagtagggatgaaagagaacgatcaacaagcaagaagaagaagagtaaagataaggaaaaggaccgggaaagaaaatcagagagtgataaagatgtaaaacaggttacacgggattatgatgaagaggaacaggggtatgacagtgagaaagagaaaaaagaagagaagaaaccaatagaaacaggttcccctaaaacaaaggaatgttctgtggaaaagggaactggtgattcactaagagaatccaaagtgaatggggatgatcatcatgaagaagacatggatatgagtgactgaatattgcctctgagggagtccaactgtatacctgcatcagtgtcattcctttgtgtgatttcttaatgctgtatttgttcatctcaaacctagatgtatacagctctgagttataaatggttataaagctcctgttactcatattagttatttacatcaaaaagcttttagaaaatggtacgaggtaaccaattcttgtcatggtgaaatctgattgagtaaccaagcagttttactattctggtgctgcttcataacaaaaatgaaaagctgcatgcatctacagcaggcatggattgtttatgtcgtatgatatcctttattaagtaagttcacttatagtatttctataatttgattcattgccgtaatagagccatgtaggaaatgcactgattgcatgttattgtggcaagaatatcctaaatgtcattaaaatcctccaacatgatggatctacttatggtcttgtttgttgacatgacaaattaacattcttatagttacatctggaaatgagcatttgaaatagataatcctttaagccttgtggcaaaatttttgtggcttttgtttaactttgaaaggttattatgcactaaccttttttggtggctaattagggtttaaatacagaaacaagatttcaaataaaactgtctttgggcagtgagtaaatagcatattttgaagtagagttgtatactttttcataagatgtttgggaatttttttcctgaagtaataatttattcccacatctacatcagtgaaagctatctacctatcctgagtctatcttaaaggaaaaaaagaaaaaaaccttatctcttgcccttattttgaattttccactctttcattaatttgttttaagctcctgttggaaaaaaaggggtagtgcattttaaattgaccttcatacgcttttaaaataagacaaatctacttgataatgtacctttatttgatctcaagttgtataaaaccaataaatttgtgttactgcagtagtaatcttatgcacacggtgatttcatgttatatatgcaaagtaggcaactgttttcttagttacagaagtttcaagcttcacttttgtgcagtagaaacaaaagtaggctacagtctgtgccatgttgatgtacagtttctgaaattgttttacaagactttgataataaaacccttaaactta

SEQ ID NO: 68 - DNA, 757 bp, Homo sapiens
gccgtgggcaagacctgccttctcatcagctacaccaccaacgcctttcccggagagtacatccccaccgtgtttgacaactattcagccaatgtgatggtggacagcaagccagtgaacctggggctgtgggacactgctgggcaggaggactacgaccgtctccggccgctctcctatccacagacggacgtcttcctcatctgcttctccctcgtcagcccagcctcttatgagaacgtccgcgccaagtggttcccagaagtgcggcaccactgccccagcacacccatcatcctggtgggcaccaagctggacctgcgggacgacaaggacaccatcgagaaactgaaggagaagaagctggctcccatcacctacccgcagggcctggcactggccaaggagattgactcggtgaaatacctggagtgctcagccctcacccagagaggcctgaaaaccgtgttcgacgaggccatccgggccgtgctgtgccctcagcccacgcggcagcagaagcgcgcctgcagcctcctctaggggttgcaccccagcgctcccacctagatgggtctgatccgccgccgccccaggcccgcgggctgctgacagagatacgcgccgtggtgcgcacggagcccttcacgggacgctacagcctgtgccgggccgggagctgggcagggggaaattagcagtggtgagaaaatgtataaagatagattctgggaaagaatttgctgcaaagttcatg

SEQ ID NO: 69 - DNA, 3423 bp, Homo sapiens
acggccgcggtctccggaggtggcgggggtgttggggacgggtgctgcgaccggcactgcccatccgagcgggacgggcgctgagtggccgggaggagccgggtagccgcctggaggagcagtctcggggcctattattggttttttccctccgagaccgattccatctgcagagaccgcgacgccccatcctgggccgggccgcagtgccgcccgcctgagaggcgccgcccgccagccggcccgagcgaacctggagccgccgccgtgcccgccgctcttctcgcggagcctgggcggtcggcggggcctggggcctgggcttcgggcgcggcgttgcggcggccgctcctccccccgcagaacacgctgggccccgggcctggcccggccgagcgccgcgccctcctgacccgcggccgcggagtccggcccccacggcccctcgggccccggcctgccgcccggatccccgcctcctgggcggatctgagttattttttggtctccccctcccccttgagatcgcggcaccggagggccgaccccgccacctgggtcagtgcccgccccggggaagcgtccctcgttttgttcttccccgcgagctctcccgcgcgcccctctcctttctgtgcttaatggatggggttttgagtttttcccctttatttttgtcggctcttgactgggaggcccggcgcgaggctctgcgtctctgcgtccctcgtcgccgcctcgcgcccgcgcggatcccgtcacctgcttcccgccggggatggccggccagtgacggcgccgggtggcccgcgcgtggacacggggccctcgcccaagctgccaccgagccgcggcccccgccctcgacccttctctctcccgtattccgagctctctggaaagagaggagactccagggaagatgtggctgaagctttttttcttgctcctctatttcctggtcctgttcgtcctggccaggttttttgaggccattgtgtggtatgaaactggcatctttgccacccagctggtggatccggtggcgctgagcttcaagaagctgaagaccattttggagtgccgggggttgggctactcagggttgcccgagaagaaggatgtccgggagctggtggaaaagtcaggtgacttgatggagggtgagctctattctgctctcaaggaagaagaagcatccgaatcggtttctagtaccaatttcagtggtgaaatgcacttctatgagcttgtggaagacacaaaagatggcatctggctggttcaggtcatagcaaatgacagaagtcccttggtgggcaaaattcactgggagaaaatggttaaaaaggtgtcaagatttggaatacgtacaggcacatttaactgttccagtgatcccagatattgcaggagaagaggctgggtccgatccacactcattatgtctgttccacaaacaagtacttcaaaagggaaagtcatgcttaaagaatacagtggacgcaagattgaagtagagcacatttttaaatggataactgctcatgcagcttctcggatcaaaaccatttataatgctgaacacttgaaagaagaatggaataaaagtgatcagtattggttaaaaatatacctatttgcaaaccttgaccagcccccagctttcttctctgcactaagtataaagtttactggaagagttgagtttatttttgttaatgtagaaaattgggacaacaagagttatatgacagatattggcatatataatatgccatcatacatacttagaactcctgaaggaatttacaggtatggaaaccacacaggcgaatttatatcccttcaggccatggattcatttttgcgctcattacaacccgaggtaaatgatctgtttgttttgagcttggttctagttaatcttatggcttggatggacttatttattacacaaggagctaccataaagcgatttgtggttctcataagcactttagggacatataattctctattaattatttcctggctacctgtgttgggctttttacagctaccttacttagatagcttttatgaatatagcttaaaattgttgagatattccaatacaaccacactggcttcatgggtaagggcagactggatgttttactcttcacacccagccctgtttctcagtacataccttggtcatggtttactaattgattactttgagaagaagagaaggcgcaacaacaacaatgatgaagtcaatgccaataacttagaatggttatcaagtctgtgggactggtacaccagctacctcttccacccgattgcttcttttcagaactttcctgtagaatctgattgggacgaagaccctgacttattcttggagcgcttagctttccctgacctttggcttcaccctctgataccaactgattatattaaaaacttaccaatgtggcgatttaaatgtcttggagtccagtctgaagaggaaatgtcggaggggtctcaagatactgaaaatgactcggaaagtgagaacacagacactttgagtagtgagaaggaagtatttgaagataagcaaagcgtacttcacaattctccaggaacagcaagtcactgtgatgctgaggcttgttcatgtgccaataaatattgtcagaccagcccatgtgaaaggaaggggaggtcatatggatcatataacactaatgaagatatggaacctgattggttaacttggcctgctgatatgctgcactgtactgaatgtgttgtttgcctagagaattttgaaaatggatgtttgctaatggggttgccttgtggtcatgtgtttcatcagaattgcattgtgatgtggttggctgggggccgacattgttgccctgtttgccggtggccttcttataaaaaaaagcagccatatgcacaacaccagcccttgtcaaatgatgtcccatcttaaccatgtgcaatttgtcctttataagctttgagtatcttacagcttgcctttttaatgttagtcacaatgtttttgtggtttgaagtttagtttaatgttagtgcagtgacgggaaatacacattatgctaatgttgatgacagaatttatttggttgccttgtgtgttaattgaatgcatacctaattgtaaaatttttttatttacaacattggaaattcagaagttaatgtttttttgtaagcacaaaagaagtattatagaaatttatcctagcaagactttacaagataggatcaaattctaatggaattgagccggtttcttatcctaaatgtttcctccctttttacaatctctgtccagcacctcttggttaaataatgtatgctgtgagacatgaaattaaaacagacctatgaaataaattattttaaaaccag

SEQ ID NO: 70 - DNA, 5360 bp, Homo sapiens
ttgaggtgcattgaaatgttccaagctgttacttaccttaacatgttcttgaggtaccatggcatggattaaaaggaaatttggtaagtggcctccacttaaacgacttactagggaagctatgtgaaattatttaaaagggcgaggggatcaaatagtacttatccttcatgcaaaagttgtacagaagtcatatggaatgaaaaaggttttttgccctcccccttgtgtatatcttatgggcagtggatggaagaaaataaaattacaaatgaaatgcgatggttgttctgaacaaggctctcatccatgtgcatttattgggataggaaatagtgaccaagaaatgcagcagctaaacttggaaggaaagaactattgcacagccaaaacattgtacatatctgattcagacaagcaaaagcacttcatgttgtctgtaaaggtgttctatggcaacggtgatgacattggtgtgttcctcagcaagtcgtccaaaccttccaaaaagaagcagtcattgaaaaatgctgacttatgcattggctcaggaacaaaggtggctctgtttaatcgactacgatcccagacagttagtaccagatacttgcatgtagaaggagggaattttcatgccagttcacagcagtggggagcatttacattattcttggatgatgatggatcagaaggagaagaattcacagtcagagatggctacattcattatggacaaacagtcaagcttgtgtgctcagttactggcatggcactcccaagattgataattaggaaagttgataagcagaccacattattggatgcagatgatcctgtgtcacaactccataaatgtgcatttgaccttgaggatacagaaagaatgtacttatgcctttctcaagaaagaataattcaatttcaggccactccatgcccaacagaaccaaataaagagatgataaatgatggtgcttcctgggcaatcattagcacacataaggcgaagtatacattttatgagagaatgggccctgtccttgccctggtcatgcctatgcctgtcgtagagagccttaagttgaatggcggtggggacgaagcaatgcttgaacttacaggacagaatttcactccaaatttacgagtgtggtttggggatgtagaagctgaaactatgtacaggtgtggagagagtatgctccgtgttgtcccagacgttctgcattctgagaaggttggagatagttcccagcaaccagtccaggtttcagtaactttggtccgaaatgatggaatcatatattccaccagccttacctttacctacacaccagaagcagggccgcggccacattgcagtgtagcaggcgcaatccttaaggccagttcaagccacgtgccccctaatgaattaaacacaaacagcgatggaagttacacaaatgccagcacaaattcaaccagtgtcacatcatctacaccaacagtggtatcctgaactaccgtctttttgctaagactcaaacggcttgagtgcagcaaaaagttgacaaaaaaggaaaaaaaaatgaacagtcttttgtggtttattgggaaacttttcataccaggtgatactattctaaaaccccgttgtctccctgcaagtgctgatttgaaatgcagaagccacagtaaaaaaaaaaaaaaaaaaaaaaaaaaaagaaaaaaaaatcaaaatgtataaatattggaaatcaagtttttcagctgttttgttggttggttggttggtttttgtttggttttgtttaaagggacaagaagtaaataatgtggctggaatacaagttgaacaaactagaagacacaaatctaacatagtttttatggaccaaggaacttgtatattgtataagctttagtaaaaggtacattttcaccatacctttttttatatcacggtattatagtacaccttgttaccaataggttgttctcttccccaccctcctttgagctttgctctaaaatacattctggttccaagcctgaccatccttgtttaatctatcatactcttccaggtttttttttttggtctaaggctggaacttttttctttttttttcagctgaagtcttatgactttttcatgagtcaaaattgtttggatttcacgaagtcaaatcttgcaaaggcctgcatattttttttaagattatatgaagtctgtgcaaaaagctttaaaaaattgcctctgccttgcctgcatacatgcaatgtatgtaacttagtctctcttctcagacactgttgggtagttatttctgtgttttctttttttaaaaaaaaatatggacttattgtggtttatctgagaggttctaacattcacatgcaatttggtgtggcatttagctattatgagttattggcgcgaacttgtttgatatttgaagtgtctctccccttttcccatgacgtaatacataggtgtgttccaggatttgttcaggtttttccccccctcctaatcttgtacataacttgtattttgtgtaagttaaacattttatttgaacttggaatgttcccagtgatttcattcagcagggtattttctgccttgttggcaagtagcaaaaaatatgggaagtatttgctaccagttgttagatggtgccccttattggtagaatcaggaaaatgtccgcaaaagcatgttttattatctttacttttttggggggttggagggggtagcctagccagacatcatgtaatcttaaaacataagatgcttttattagatgatcaactaaaaatagctggaagacagtactttagaaacaaaatagttagtaagatatataatgcaaatgtaacttatgttttcatttttttctctgccttttttttttgttttttttctttttttccagtactgagcatctccacaaatgtctcctactcagaaaatgtttcttttctttcagttgagatttggtgcattcagggttgtaggttggccttgcttgctaacccgccggttttaccgtgctttattcctgaactttgtttatgcctttgtttggttcttctgaaattgcagcagactcattgggctacatttagtacaggaaccacgtgtgtaatgttatacaacacagtcagtaatacaatcatccctcttagagtaaaaactacctctagattgtgtaagctttttactgtccataaaacaggagccacagtaccttatgaatgcaaaactgtaacttcctacagtgtttccccacagaacattgtctttctggtgtctgggctgtttttgaaaaagtttccattaatagactttttagaaattattattagtagcattttttttccagctttgcgtcttcatcactcactcaagtgtcagactatgcactgtaaatatcttcctaacatctttaaatcgccttttcctcagttttcaaggggaaggtcatttgtaaagcacgttaggtggttaaatcagttattgcggttttctcttacagcaagcctttttaatcacccccaggctgcattttattctatatcgccttttttcttcaaatctgctccaatcatccacttctctcttataagctattcctgcctcacacctaaatctgtttcagtgatcaagggcagaactcattgtggccttatctttctttgttgtaattgttcactgtctctttcttacagaccacttattctgagtagtagttattcctccctatggagtcatggcaggaatcattacacagtgcttttgttcagagcatggacatgttccaggtgctgctttgctttaacggccacaagtttcctccacttctcaggtttggtatttagtaaggaatcaattaaattaaccaataacaaaagagatacttttgaagaacaaactattctttacccattttgtagctcaaaaataatttttcaagttcatgaccttattaaaatgaacttgtgtttttttaacaaacgtctattttattttgatagtttctttccgaagataattgaaatattatactgtaacccttttcttttcttttttgaaaagtccaagaatgtacttatacaggatttttccccacctatttttggccattctcataccacagacaaaagagtgaatgattgtcattgtagcttattgtttatcagtagttcttttgtagctgcttacattttttctttcatggtttgtgaatcatttcagtatgtaatttataggaaccttgtcctctggtatagtagactgtgtgccctcctccaggatggcattattagacatgctggtcatttaccctcagaaagactctcttatagaatggtgagtgcttcagttatagtatgtttgaattttaaaaaattcctgtttagaatgtatctatgctctcatgactatgcagtttctaacatacacatagaagctgagtctctgatccaatatgtttttatttgttccattaatttatcacatagattgggaaggcaagctaaaagccttaaaaatgccctttatattttgagtgatttcagcgttgaacacagtatactatctaaatttgctgctcactttcttaaactgttgcaattaaaggcatgtttatacatgactaatcgtgaaatgtttgtcactcttactgcacagacttatctgcaatcaaactggttagtttttttgttttgttttgttttattgtttttaatgaatctggtaccatctgtgctttcacaaaaaacttccaatgccatttttgagaactaacctaacagtcatgctaaccagaaaatccactggggaggaggttcctttgaaacaaaatgctgttcagttagtaaccaagttactttgattgcaaaagcagctgtgtttctgataagtactgaacaaatgtgtgtaattttctgtgccagacttatgactttgttttcaagcactgtaatgtgggatggatggttagaaacaataatatatagggtttctgttaaccctttcaggactcaactgtatctccttttgttaattttcccctgtgttgtgataaattgtttgccagcattcagtactgtgttggtgcagatgaggtttatatctcattttagcttatttcttgtacctttcagcatgcctacgcattcagtccttaaggggtttattttacaaactgtgcgcctgaagtttattagcaataagatagaaaatgagcaagtttataccataattttgagaaaaaaagaatctgctcagttccatatttcatccgtgaaaaacttgcaatacgagcagtttcaaggaataaataaaaaggaaatgaaaccattgt

SEQ ID NO: 71 - DNA, 3647 bp, Homo sapiens
agactggggtgggggaggggttcaggcctgttccccgcggctgcggcagcaccagggccggccgccaccgcctctagaacgcggaggaggtgggtcctgggaagcgggatgtccatcgctccagcttggtggtgaatgctgaggagagtcactgttgctgcagtctgtgccacccggaggaagttgtgtgaggccgggcgggacgtcgcggcgctctggggaatcgaaacgcggggtcggtgcgaagactctgctgctgccagaccctttcctattctggccatgcctggaaggaacaaggcgaagtctacctgcagctgccctgacctgcagcccaatggacaggatctgggcgagaacagccgggttgcccgtctaggagcggatgaatctgaggaagagggacggagggggtctctcagtaatgctggggaccctgagatcgtcaagtctcccagcgaccccaagcaataccgatacatcaaattacagaatggcctacaggcacttctgatttcagacctaagtaatatggaaggtaaaacaggaaatacaacagatgatgaagaagaagaggaggtggaggaagaagaagaagatgatgatgaagattctggagctgaaatagaagatgacgatgaagagggttttgatgatgaagatgagtttgatgatgaacatgatgatgatcttgatactgaggataatgaattggaagaattagaagagagagcagaagctagaaaaaaaactactgaaaaacagtctgcagcggctctttgtgttggagttgggagtttcgctgatccagatgacctgccggggctggcacactttttggagcacatggtattcatgggtagtttgaaatatccagatgagaatggatttgatgccttcctgaagaagcatgggggtagtgataatgcctcaactgattgtgaacgcactgtctttcagtttgatgtccagaggaagtacttcaaggaagctcttgatagatgggcgcagttcttcatccacccactaatgatcagagatgcaattgaccgtgaagttgaagctgttgatagtgaatatcaacttgcaaggccttctgatgcaaacagaaaggaaatgttgtttggaagccttgctagacctggccatcctatgggaaaatttttttggggaaatgctgagacgctcaagcatgagccaagaaagaataatattgatacacatgctagattgagagaattctggatgcgttactactcttctcattacatgactttagtggttcaatccaaagaaacactggatactttggaaaagtgggtgactgaaatcttctctcagataccaaacaatgggttacccagaccaaactttggccatttaacggatccatttgacacaccagcatttaacaaactttatagagttgttccaatcagaaaaattcatgctctgaccatcacatgggcacttcctcctcaacagcaacattacagggtgaagccacttcattatatatcctggctggttggacatgaaggcaaaggcagcattctttctttccttaggaaaaaatgctgggctcttgcactgtttggtggaaatggtgagacaggatttgagcaaaattctacttattcagtgttcagcatttctattacattgactgatgagggttatgaacatttttatgaggttgcttacactgtctttctgtatttaaaaatgctgcagaagctaggcccagaaaaaagaatttttgaagagattcggaaaattgaggataatgaatttcattaccaagaacagacagatccagttgagtatgtggaaaacatgtgtgagaacatgcagctgtacccattgcaggacattctcactggagatcagcttctttttgaatacaagccagaagtcattggtgaagccttgaatcagctagttcctcaaaaagcaaatcttgttttactgtctggtgctaatgagggaaaatgtgacctcaaggagaaatggtttggaactcaatatagtatagaagatattgaaaactcttgggctgaactgtggaatagtaatttcgaattaaatccagatcttcatcttccagctgaaaacaagtacatagccacggactttacgttgaaggctttcgattgcccggaaacagaatacccagttaaaattgtgaatactccacaaggttgcctgtggtataagaaagacaacaaattcaaaatccccaaagcatatatacgtttccatctaatttcaccgttgatacagaaatctgcagcaaatgtggtcctctttgatatctttgtcaatatccttacgcataaccttgcggaaccagcttatgaagcagatgtggcacagctggagtataaactggcagctggagaacatggtttaattattcgagtgaaaggatttaaccacaaactacctctactgtttcagctcattattgactacttagctgagttcaattccacaccagctgtctttacaatgataactgagcagttgaagaagacctactttaacatcctcatcaagcctgagactttggccaaagatgtacggcttttaatcttggaatatgcccgttggtctatgattgacaagtaccaggctttgatggacggcctttcccttgagtctctgctgagcttcgtcaaagaattcaaatcccagctctttgtggagggcctggtacaagggaatgtcacaagcacagaatctatggatttcctgaaatatgttgttgacaaactaaacttcaagcctctggagcaggagatgcctgtgcagttccaggtggtagagctgcccagtggccaccatctatgcaaagtgaaagctctgaacaagggtgatgccaactctgaagtcactgtgtactaccagtcaggtaccaggagtctaagagaatatacgcttatggagctgcttgtgatgcacatggaagaaccttgttttgacttccttcgaaccaagcagacccttgggtaccatgtctaccctacctgtaggaacacatccgggattctaggattttctgtcactgtggggactcaggcaaccaaatacaattctgaagttgttgataagaagatagaagagtttctttctagctttgaggagaagattgagaacctcactgaagaggcattcaacacccaggtcacagctctcatcaagctgaaggagtgtgaggatacccaccttggggaggaggtggataggaactggaatgaagtggttacacagcagtacctctttgaccgccttgcccacgagattgaagcactgaagtcattctcaaaatcagacctggtcaactggttcaaggctcatagagggccaggaagtaaaatgctcagcgttcatgttgttgggtatgggaagtatgaactggaagaggatggatccccttctagtgaggattcaaattcttcttgtgaagtgatgcagctgacctacctgccaacctctcctctgctggcagattgtatcatccccattactgatatcagggctttcacaacaacactcaaccttctcccctaccataaaatagtcaaataaataaactgcagtcacgttggcctgaaaaaaaaaaaaaaaaaaaaaaaaaaaaaaaa

SEQ ID NO: 72 - DNA, 1382 bp, Homo sapiens
aaaacagacaaatccaagggtgtgaggtaaacgagtgtctgcatttagattccacaaaaccaaaatccatgttgaacaaagttaagtccgtacacagtgactttttgggtgagccgtgtgtgtctgtctgttgtgtgtgtgcctcaagccctgttttcctgtgaagatactttgagtggcagccattctctccacgtgaaccacacgtctggagcacagacaggcctctcaaggtcattgatcttacgcatttactgtttaccgaacaaatgtctgactgtgtactcgggtgtactccgcagcattgtcgactgcagtcccctgtgtttgccagagatactgtgctcgaagtagaggttttactctactcatcactgcgatttgcacattgctccgtggacactcggaggcctgcgttctgttccctataaatggaagcgtgctctgagcctgtctgcctccctcggctgctgctggtcctcagtaccagcgcccgggggtgtccacaaccacttgggacagaagaaggtggaatttcagacagaagcttgactgggtcttcaatgacaggcttggactagctgtggcccagacatcggccctgcccagaattgccaggaggaggctttgcaggctctagaggagccgcagggcctgcctgcctctggtgagtccaacaggcacaagcaagctggcgtgtggccagaggtagccggagtgtgtcacagcccctcagatgcctttccttccacctttttttattttttaagaatcccaaataactcactgaagtgtctcaaaggcgaacaagttttaccaaaatgaatcctttttcagttaacagatcaaatggatgagttctgagcctctcaagttcctttccccagttagagtggggaactgggtaagtgttaactgtgggactcactgcagcgtcctatcctaaaggcacgagaagacggaaatgcaacctgcggagctgggcttggttcccaggtcacagtttggcccccgctacaggatgctgccctgctcagagagagatttaatagggagctgaaggaatcgttagggggccagggagatgtgactgaggctggctttccacgtgaatgagacggggtcggtggagggtttggtgctacagccagtcagaagatttgcaaatgcgaacacattcctgtgtgaggcacgttaccctttgtcagttattgtgaatatgtgtattttaagcaataagattcagctggtcagacttttctgggcagtctcagtgacgcatttcctgtgctgtgattgttctgaagacagagtggctctaaccactgtgagaagcccaaataaaaattgatcccaaaaaaaaaaaaaaaaaaaaaaaaaaa

SEQ ID NO: 73 - DNA, 4217 bp, Homo sapiens
cttcccggccccagccaaggctgtcgtttacgtgtcggacattcaggagctgtacatccgtgtggttgacaaggtggagattgggaagacagtgaaggcatacgtccgcgtgctggacttgcacaagaagcccttccttgccaaatacttcccctttatggacctgaagctccgagcagcctccccgatcattacattggtggcccttgatgaagcccttgacaactacaccatcacattcctcatccgcggtgtggccatcggccagaccagtctaactgcaagtgtgaccaataaagctggacagagaatcaactcagccccacaacagattgaagtctttcccccgttcaggctgatgcccaggaaggtgacactgcttatcggggccacgatgcaggtcacctccgagggcggcccccagcctcagtccaacatccttttctccatcagcaatgagagcgttgcgctggtgagcgctgctgggctggtacagggcctcgccatcgggaacggcactgtgtctgggctcgtgcaggcagtggatgcagagaccggcaaggtggtcatcatctctcaggacctcgtgcaggtggaggtgctgctgctaagggccgtgaggatccgcgcccccatcatgcggatgaggacgggcacccagatgcccatctatgtcaccggcatcaccaaccaccagaaccctttctcctttggcaatgccgtgccaggcctgaccttccactggtctgtcaccaagcgggacgtcctggacctccgagggcggcaccacgaggcgtcgatccgactcccgtcacagtacaactttgccatgaacgtgctcggccgggtaaaaggccggaccgggctgagggtggtggtcaaggctgtggaccccacatcggggcagctgtatggcctggccagagaactctcggatgagatccaagtccaggtgtttgagaagctgcagctgctcaaccctgaaatagaagcagaacaaatattaatgtcgcccaactcatatataaagctgcagacaaacagggatggtgcagcctctctgagctaccgcgtcctggatggacccgaaaaggttccagttgtgcatgttgatgagaaaggctttctagcatcagggtctatgatcgggacatccaccatcgaagtgattgcacaagagccctttggggccaaccaaaccatcattgttgctgtaaaggtatcccctgtttcctacctgagggtttccatgagccctgtcctgcacacccagaacaaggaggccctggtggccgtgcctttgggaatgaccgtgaccttcactgtccacttccacgacaactctggagatgtcttccatgctcacagttcggtcctcaactttgccactaacagagacgactttgtgcagatcgggaagggccccaccaacaacacctgcgttgtccgcacagtcagcgtgggcctgacactgctccgtgtgtgggacgcagagcacccgggcctctcggacttcatgcccctgcctgtcctacaggccatctccccagagctgtctggggccatggtggtgggggacgtgctctgtctggccactgttctgaccagcctggaaggcctctcaggaacctggagctcctcagccaacagcatcctccacatcgaccccaagacgggtgtggctgtggcccgggccgtgggatccgtgacggtttactatgaggtcgctgggcacctgaggacctacaaggaggtggtggtcagcgtccctcagaggatcatggcccgtcacctccaccccatccagacaagcttccaggaggctacagcctccaaagtgattgttgccgtgggagacagaagctctaacctgagaggcgagtgcacccccacccagagggaagtcatccaggccttgcacccagagaccctcatcagctgccagtcccagttcaagccggccgtctttgatttcccatctcaagatgtgttcaccgtggagccacagtttgacactgctctcggccagtacttctgctcaatcacaatgcacaggctgacggacaagcagcggaagcacctgagcatgaagaagacagctctggtggtcagtgcctccctctccagcagccacttctccacagagcaggtgggggccgaggtgcccttcagcccaggtctcttcgccgaccaggctgaaatccttttgagcaaccactacaccagttccgagatcagggtctttggtgccccggaggttctggagaacttggaggtgaaatccgggtccccggccgtgctggcattcgcaaaggagaagtcttttgggtggcccagcttcatcacatacacggtcggcgtctcggaccccgcggctggcagccaagggcctctgtccactaccctgaccttctccagccccgtgaccaaccaagccattgccatcccagtgacagtggcttttgtgatggatcgccgtgggcccggtccttatggagccagcctcttccagcacttcctggattcctaccaggtcatgttcttcacgctcttcgccctgttggctgggacagcggtcatgatcatagcctaccacactgtctgcacgccccgggatcttgctgtgcctgcagccctcacgcctcgagccagccctggacacagcccccactatttcgctgcctcatcacccacatctcccaatgcattgcctcctgctcgcaaagccagccctccctcagggctgtggagcccagcctatgcctcccactaggccgcgtgaaggttcccggaggatgggtctcagccgagcctcgtgcacccccaagatggaacatccctgctgcattcacactggaacaagcccctccagatgagtgccccggccccaggccagcttcactgccgtctcttcacacagagctgtagtttcggctctgcccattagctcattttatgtaggagttttaaatgtgtgtttttttcctttcaagtcttacaaagctaagactttttggctcattcctttttgcatggttgtctagggtttctggacaatgtgctgttgcatttttattttcctagccttgctaaaatctttcccttctcaagactttgagcagttagaagtgctctttagaagttgtctgtgggtgatgttactgtagtggtctcagggaaaggattgtccagttactttagggggtttttggtggggtttttccccctgtgaaaacttactttgcccctagtctggctgctgctaggacttctgaggagcaatgggacatgagtgtccctgtatctgcgccactgccgcaagggaagcctcaggaaccagcacctggaggccaggatagccaagccctgggtgagcgagaggctggagaacacaggagctcacccagggctgctgcccaaccatgggccactgtgaacagacttcagtcctctgtttttgtttcataagccgttgagacatctgatggacttggcttaggccctgctgggacatcccacgtgtgatccctttcactccatcaggacaccaggactgtccttaggaaaatgtccttgagatggcagcaggagtcatattttctgtgtgtgtgtttcggaaagccgctgtgtcctgcctcagcacaaagacccagtgtcatttgctcctcctgttcctgtgccactccagaacctcagcagatctgagccaccgcctgccagtgtgagaggcggccactttcatggcagcttatcaggcgcagggccccagacagcttcccagccggccctagagcccggcctgggccaatgatggagggcggccaccagcccagggcctgcccatccagaagggactccccagggcctgggggaggagacccttggaaaagtcctctcttcccagctcctgattctggatctgagattctcagatcacaggcccctgtgctccaggccgaggctgggccaccctcagggagatccagagactcatgcccatggccatccatgcgtggacgctgtgtggagagtccaggatgacgggatcccgcacaagctcccttcagtccttcagggctgggccatgtggttgatttttctaaagctggagaaaggaagaattgtgccttgcatattacttgagcttaaactgacaacctggatgtaaataggagcctttctactggtttatttaataaagttctatgtgatttttt

SEQ ID NO: 74 - DNA, 126 bp, Homo sapiens
gtgtctcctgcacctgcgctggttcctgcaagtgcaaagagtgcaaatgcacctcctgcaagaagagctgctgctcctgctgccccgtgggctgtagcaagtgtgcccagggctgtgtttgcaaag

SEQ ID NO: 75 - DNA, 5032 bp, Homo sapiens
gctgagcgggttggcatctggggcagcgggctcgctccaggccgtcgggggccgctcgccagcgtcgcccgctgtgttgggagcgcgggccgtgggcgtcgctcggccttgtccgcggcgtccccgctgccggccacggcgctcagcgcttgtgctctgtgttgcaggtctaccccgagccccggagcgagagcgagtgcctgagcaacatccgcgagttcttgcgcggctgcggggcttccctgcggctggagacgtttgatgcaaatgatttgtatcaggggcagaattttaacaaggtcctcagttccttagtgactctaaataaagtaacagcagacatcgggctggggagtgactccgtgtgtgcccggccctcgtctcaccgcataaagtcttttgactcccttggatcacagtctttgcacactcggacttcaaaactgttccagggccagtatcggagtttggacatgaccgacaatagcaacaatcaactggtagtaagagcaaagtttaacttccagcagaccaatgaggacgagctttccttctcaaaaggagacgtcatccatgtcacccgtgtggaagagggaggctggtgggagggcacactcaacggccggaccggctggttccccagcaactacgtgcgcgaggtcaaggccagcgagaagcctgtgtctcccaaatcaggaacactgaagagccctcccaaaggatttgatacgactgccataaacaaaagctattacaatgtggtgctacagaatattttagaaacagaaaatgaatattctaaagaacttcagactgtgctttcaacgtacctacggccattgcagaccagtgagaagttaagttcagcaaacatttcatatttaatgggaaatctagaagaaatatgttctttccagcaaatgctcgtacagtctttagaagaatgcaccaagttgcccgaagctcagcagagagtcggaggctgctttttaaacctgatgccacagatgaaaaccctgtacctcacgtattgtgccaatcacccttctgcagtgaatgtcctcacggaacacagtgaggagttgggggagttcatggagaccaaaggtgccagcagccctgggattctcgtgctgaccacgggcctgagcaaacccttcatgcgcctggataaataccctacgctgctcaaagagctcgagagacacatggaggattatcatacagatagacaagatattcaaaaatccatggctgccttcaaaaacctttcagcccaatgtcaagaagtccggaagaggaaagagcttgagctgcagatcctgacggaagccatccggaactgggagggcgatgacattaaaactctgggcaacgtcacttacatgtcccaggtcctgattcagtgtgccggaagtgaggaaaagaatgaaagatatcttctactcttcccaaatgttttgctaatgttgtctgccagtcctaggatgagtggctttatctatcagggaaagcttccaacgacaggaatgacaatcacaaagcttgaggacagtgaaaatcatagaaatgcatttgaaatatcagggagcatgattgagcggatattagtgtcgtgcaacaaccagcaggatctgcaggaatgggtggagcacctacagaagcaaacgaaggtcacgtctgtgggaaaccccaccataaagcctcattcagtgccatctcataccctcccctcccacccggtcactccgtccagcaagcacgcagacagcaagcccgcgccgctgacgcccgcctaccacacgctgccccacccctcccaccacggcaccccgcacaccaccatcaactggggacccctggagcctccgaaaacacccaagccctggagcctgagctgcctgcggcccgcgcctcccctccggccctcagctgctctctgctacaaggaggatcttagtaagagccctaagaccatgaaaaagctgctgcccaagcgcaaacctgaacggaagccttcagatgaggagttcgcgtcccggaaaagcacagctgctttggaagaagatgctcagattctgaaagtcattgaagcttactgcaccagcgccaaaacaaggcaaacactcaattcaagttcacgcaaagaatctgctccacaagttttgcttccagaagaagagaaaattatagtggaagaaactaaaagtaatggtcagacagtgatagaagaaaagagtcttgtggataccgtatatgcattaaaggatgaagttcaagaattaagacaggacaacaaaaagatgaagaaatctctagaggaagaacagagagcccgcaaagacctggagaagctggtgaggaaagtcctgaagaacatgaatgatcctgcctgggatgagaccaatctataagggacgtcctcagttctttctgttgaagaccagttctgaggtgaagctgggcacccctgacccaagtcggggtgcactcaggaccacagggcagggctgggtggggcgccaccttgctctctgtatatagaaaagctggagcttattctgcgaatggagacgatcaaaccatgactgatgaatccagacaggagggattgactctgaggacctgagctacatcaatccactctgtgaacatctcagttacctcattctgcaataagttcagtgactgactaaaagtcttgtttttccagactttgaattgaatatataaatattatatatacatgtttcttgtaaatatcccattttgaatgcatacctgtggtggttctgtccgggctaatccccatgctagaatgtcctttccagctacgtgaataagaagtcccatgcccgcacccaccggaagcagaagcctggtggatgcctggttcgttccgcagcaccagggcctccaccgtgctgtggcagcaccccccatgtcggtatttctaaataaccttatttatacctgcagagatacacttcagtcccattcagaagtcttctcttaaagcagcattacagtcccagacctgcgggtttctgagggcagcttgctggctgacagactcagtcttgacctcaaggaaggcccatacggcactgccgcatccacctagaggtgtttgctcttgtccgctgtctgagtactgtgattctcagatgagtttgctgcgttttgggaggacacagacggttctgtataggctagttcagtaacaacaaaatacactgttttgtcttccctcaaagagagatcttactagaacctgtaaatagaatgtattatttattataagtcactgcagctgatgaaaacagatggaggccatgctgcaggctgatactgatgggtggagttttgtcatcaggccagcctcatcccgaggtctcctccaccattggccgtagccagcaggcttcagtgctcaccgaaagtaaaatcccctccttcagcaagaataaagcaatatacaccttaggttccactaagtaacataggcataagcagggaacgtttcccccactgtgttccagtgcagaggagacgaagcctgtcctcaccgcggctcgctgggcccaggctggctctggaaagcctgtgcggtcctgggcaggaagcccggcccgtggagcaggttttcgttctgcttcagcaataaataagggtgaccacagggactttgcttttggtttcctttcctgtgaaaaggttggttttaaagtgagatacacttttccgtagaacaagtgttctatctttaaaaacccaaattgcagcaccgtggattactggtctcagaacaactcattgcgcatcagatttgactctctgattttctgtctattggccaaattgccctttaactgcacctgaatcctttgtgtactgatgcctttgagctgggcaccttgggagagtgttgtgttgctgtttacggttcttccttgcccttgctaattacagtctctggtgcccagcaagcccctttggcttccttccgtgactggtcacgttgtctgcctgggctcagcgtggacctgccccatgctgcagaacctggcctcacctggacttttcactagaattgccagcttcctcaacttagcagatcattcactcatgcgggcacaagcaaagatcaacactttcttttttggtaagcttgagttttacaagttattttttggtgatgcgtaagacattgcagtgggaaaccattcaacttgagtttattggagtttgctgttgtagcaggttttaactcaggaacaactcttgtctgatctctccgcccctctgccgggaggcgacattaactgtcctctcggagccggtagcgttgctgtccgagtccccaggacggatctcctgcagacctgccttaatgctcagatcgaagtatttcacaagaatacttgtgtttttaacagcccttcccctggacggtgcggccatgagggcctcatgttacggcattgccttttctttctgtggatccagtatcttcctcggctttttagggagcaggaaaaatgcgtctgagagcaactctttttaaaaacctgccctgttgtatataactgtgtctgtttcaccgtgtgacctcccaagggggtgggaacttgatataaacgtttaaaggggccacgatttgcccgagggttactcctttgctctcaccttgtatggatgaggagatgaagccatttcttatcctgtagatgtgaagcactttcagttttcagcgatgttggaatgtagcatcagaagctcgttccttcacactcagtggcgtctgtgcttgtccacatgcactgggcgtctgggaccttgaatgcctgccctggttgtgtggactccttaatgccaatcatttcttcacttctctgggacacccagggcgcctgttgacaagtgtggagaaactcctaatttaaatgtcacagacaatgtcctagtgttgactactacaatgttgatgctacactgttgtaattattaaactgattatttttcttatgtc

SEQ ID NO: 76 - DNA, 665 bp, Homo sapiens
  misc_feature (256)..(546): The "n" residues at positions 256, 340, 345, 369 and 423 are "g" according to MGC5508 gene sequence in the Entrez human genome sequence database.  The "n" residues at positions 524 and 546 are "c" according to the same gene sequence.
  misc_feature (558)..(661): Each "n" represents a nucleotide selected from a, t, g or c, or contains no nucleotide.
aataaaatagcgtgcactttatttaaaaccaaccaagcactgataaaaaatatatatcactgcagctgtgattccacatcaaacctgaacagtaagaattgggcatttattcttcacatcatgtgccaagcctggcagagaaggacatccacctccactagagcctcaaaggaaaagtggcccctaaccaccaagacagggtaccctggtggagaggggcagctggcagctcaccctgctctctgcagaccacgtnaagggaaaggagctgcctgtgttcctcccgggctgccggggtgggcactggtcagcaactccttctcggtttcaggttgtggancgatngggagagaagtgcatgcagttgtncagacaaggaggcgggtcctccctcctctttcagggtctctgaaacccccacanggcatataatgccagcaaggtcccacttgcaggcacatgccttacaaagcagcagcatcttttgctttgggctgatgggggatcaagattctgagagtgantgctcttttcttgacacaaagnaggcacaggacntttcctacatacagtatggcagcaggcaagcagaaggncctgctggctcggattaaaggncttgaaagaggancaaggtaatcctcttccctggnagccccanaagt

SEQ ID NO: 77 - DNA, 2557 bp, Homo sapiens
cagagggaggaagaagcggcggcgcggcggcggcggctcctctttgcagagggggaaactcttgggctgagagcaggaacaacgcggtaggcaaggcgggctgctggctcccccggctccggcagcagcggcggcagcccgagcagcggcagcagcagcggcagcaccccaggcgctgacagccccgccggccggctccgttgctgaccgccgactgtcaatggagctggaaaacatcgtggccaacacggtcttgctgaaagccagggaagggggcggaggaaagcgcaaagggaaaagcaagaagtggaaagaaatcctgaagttccctcacattagccagtgtgaagacctccgaaggaccatagacagagattactgcagtttatgtgacaagcagccaatcgggaggctgcttttccggcagttttgtgaaaccaggcctgggctggagtgttacattcagttcctggactccgtggcagaatatgaagttactccagatgaaaaactgggagagaaagggaaggaaattatgaccaagtacctcaccccaaagtcccctgttttcatagcccaagttggccaagacctggtctcccagacggaggagaagctcctacagaagccgtgcaaagaactcttttctgcctgtgcacagtctgtccacgagtacctgaggggagaaccattccacgaatatctggacagcatgttttttgaccgctttctccagtggaagtggttggaaaggcaaccggtgaccaaaaacactttcaggcagtatcgagtgctaggaaaagggggcttcggggaggtctgtgcctgccaggttcgggccacgggtaaaatgtatgcctgcaagcgcttggagaagaagaggatcaaaaagaggaaaggggagtccatggccctcaatgagaagcagatcctcgagaaggtcaacagtcagtttgtggtcaacctggcctatgcctacgagaccaaggatgcactgtgcttggtcctgaccatcatgaatgggggtgacctgaagttccacatctacaacatgggcaaccctggcttcgaggaggagcgggccttgttttatgcggcagagatcctctgcggcttagaagacctccaccgtgagaacaccgtctaccgagatctgaaacctgaaaacatcctgttagatgattatggccacattaggatctcagacctgggcttggctgtgaagatccccgagggagacctgatccgcggccgggtgggcactgttggctacatggcccccgaagtcctgaacaaccagaggtacggcctgagccccgactactggggccttggctgcctcatctatgagatgatcgagggccagtcgccgttccgcggccgtaaggagaaggtgaagcgggaggaggtggaccgccgggtcctggagacggaggaggtgtactcccacaagttctccgaggaggccaagtccatctgcaagatgctgctcacgaaagatgcgaagcagaggctgggctgccaggaggagggggctgcagaggtcaagagacaccccttcttcaggaacatgaacttcaagcgcttagaagccgggatgttggaccctcccttcgttccagacccccgcgctgtgtactgtaaggacgtgctggacatcgagcagttctccactgtgaagggcgtcaatctggaccacacagacgacgacttctactccaagttctccacgggctctgtgtccatcccatggcaaaacgagatgatagaaacagaatgctttaaggagctgaacgtgtttggacctaatggtaccctcccgccagatctgaacagaaaccaccctccggaaccgcccaagaaagggctgctccagagactcttcaagcggcagcatcagaacaattccaagagttcgcccagctccaagaccagttttaaccaccacataaactcaaaccatgtcagctcgaactccaccggaagcagctagtttcggctctggcctccaagtccacagtggaaccagcccagacccttctccttagaagtggaagtagtggagcccctgctctggtggggctgccaggggagaccccgggagccggaaggaggccgtccatcccgtcgacgtagaacctcgaggtttctcaaagaaatttccactcaggtctgttttccgaggcggccccgggcgggtggattggatttgtctttggtgaacattgcaatagaaatccaattggatacgacaacttgcacgtattttaatagcgtcataactagaactgaattttgtctttatgatttttaaagaaaagttttgtaaatttctctactgtctcagtttacattttcggtatatttgtatttaaatgaagtgagactttgagggtgtatattttctgtgcagccactgttaagccatgtgttccaaggcattttagcggggagggggttatcaaaaaaaaaaaaaatgtgactcaagacttccagagcctcaaatgagaaaatgtctttattaaatgtagaaagtgatccatacttcaaaaaaaaa

SEQ ID NO: 78 - DNA, 1085 bp, Homo sapiens
ggtttctattgacttgggttaatcgtgtgaccgcggtggctggcacgaaattgaccaaccctggggttagtatagcttagttaaactttcgtttattgctaaaggttaatcactgctgtttcccgtgggggtgtggctaggctaagcgttttgagctgcattgctgcgtgcttgatgcttgtcccttttgatcgtggtgatttagagggtgaactcactggaatggggatgcttgcatgtgtaatcttactaagagctaatagaaaggctaggaccaaaccagaaacctccaattctcatgtggaagcccatgccctcaccctccaacatgaaagcctctgcagcacttctgtgtctgctgctcacagcagctgctttcagcccccaggggcttgctcagccagttgggattaatacttcaactacctgctgctacagatttatcaataagaaaatccctaagcagaggctggagagctacagaaggaccaccagtagccactgtccccgggaagctgtaatcttcaagaccaaactggacaaggagatctgtgctgaccccacacagaagtgggtccaggactttatgaagcacctggacaagaaaacccaaactccaaagctttgaacattcatgactgaactgaaaacaagccatgacttgagaaacaaataatttgtataccctgtcctttctcagagtggttctgagattattttaatctaattctaaggaatatgagctttatgtaataatgtgaatcatggtttttcttagtagattttaaaagttattaatattttaatttaatcttccatggattttggtgggttttgaacataaagccttggatgtatatgtcatctcagtgctgtaaaaactgtgggatgctcctcccttctctacctcatgggggtattgtataagtccttgcaagaatcagtgcaaagatttgctttaattgttaagatatgatgtccctatggaagcatattgttattatataattacatatttgcatatgtatgactcccaaattttcacataaaatagatttttgtataacaaaaaaaaaaaaaaaaaa

SEQ ID NO: 79 - DNA, 4087 bp, Homo sapiens
gaattcatgccgttgggtggagtcagcgcccccaggctctacttggaaaacctttaagctcttttctttcgtaagctctctgggcgagggtggtggtatgttttgtgaggtttagcttagccccaaatcctcaagccccgccgccgccgctagtgcggtgcaggaaccgggccagtactgcgcccagggacagagcgctggggaggaacaaaggcggcgctaggctgtgttatccgagagatctttcgggggccgcgggcagcccgtcctgccgcgaccgagggtctgggcgtcccggctgggccccgtgtctgtgcgcacggtttcgctgatgctgaggggccactttctgtctcgcgttgttctctggggaccgggagaggaggaggcacccaaaaagagcgggggcgttgggcgagctcgggggacgtgggagggggaacgggaacaaagcgcagcctagggttagcgtgggaagaccctccgcggtctttggcgttttggaaagatacccacacattcccgggaaaacatggtgagtttctgcccggagcccccggagcgggtgtcagggcggcgaggggcggggttgtttgtttctggcttctatggcgttggagccactgggcgcggttcgcctcactgaacctcttctgtcaggagctgactgaaaaaaaaacaaaaaaacctttcatcattgcggaactgtaggctccaaaagggttttcttcactattataagttagatgacttttttttttcttgagcaaaatcataattcacttcacaagctctttaatgtctggtctggggacgccctgccctgaccgactgaagtgtgtgtgtgtgtgtgtgtgtgtgtgtgtgtgtgtctgtgggacgcctgccctgaccgactgaagtgtgtgtgtgtgtgtgtgtgtgtctgtctgtctcgtctggactgcacagttcagcgagggagaaaggcccactttgtgagggtaccgatggtcaggacccagggaaacgcccttccccgccgcccccccgccccgcccccaccacattcagcgaatagacaattgaaagtggtagccctaaagaccacagagaagaaaacctctattggatgcaaagaatatgaatattatgtgatgggtagagaatctcaggatgaaaatactattttgttgttttaaataaatatttcattatccttccactgggcttttattctttggtaccttttcatgtgatgcttgtttctaacttaggaacttttgtgtgtgtgtgtgtaagatacggataatttttcagcttttacagtggagaagatctggaaaaaggtttttttttaaaaaaaaaagtaatgaaattgctacagacaaagaagaattatactccgcttcccgttgtcccccgttccagtgcatcttaattaattcatttcaattcaggcacatggtcccgggcggtcagaggaggaaaactggcaaaacagcacaatgagatcatgtaggcagctgctggaaatagagcttgctctgttaaataatgtagcagacagtacaggctagcaccaggcacacagcaaatacagcaatgcagcaatgcagaaggcagaccttgtctaaactcctagtattgatggattctgcagtacagatgtccggattataatatcaagtcctattcagaggaaactttcatctttatttaaaagggaagaaagcagtaaaattaatcccaattaagtcataattggatttacttcattttacaaatttgtgctttgaatactgaatagcttttaaatatgaaaatcttctattcaagactggtagtaggccaatggctggatacccgtgctgacagggccaaggcgacaatcattattcagaccacacccatatgcagcatttgtagcaggtgattttccttaaatctttgtatcgtgctggggatatgacctcaaataatttagaaaaatatctgtatattattagaaatattttgaaatttcctataatttaaatgctaatacaccttaattttacatttttcacttttcctccccacagcgtgagtgcatctccatccacgttggccaggctggtgtccagattggcaatgcctgctgggagctctactgcctggaacacggcatccagcccgatggccagatgccaagtgacaagaccattgggggaggagatgattccttcaacaccttcttcagtgagacgggggctggcaagcatgtgccccgggcagtgtttgtagacttggaacccacagtcattggtgagttgacctcagtaacccaagtgagatcccagggtgctggacaggaggtctgtcctggggggctccgctggtcactcacccactctcctcccgctcctcgtcccctcctcctcctccccctgctcctcccccatcatgtctccagatgaagttcgcactggcacctaccgccagctcttccaccctgagcaactcatcacaggcaaagaagatgctgccaataactatgcccgagggcactacaccattggcaaggagatcattgacctcgtgttggaccgaattcgcaagctggtatgtttcttttcaagaataaagtaaattaatgagcctaaagaacacttttgaaataatgctttttttttcaaacacagaattgaactgttattttaataaagagtggaatgagtcattctttggggtttttaaaattcagttaaaatgaactatttgatgtcattttgtaaatgttaatgagaattttttaaaagcatttgtcaaataagatctaagtcctggagatgtatgaaagtgaaatatattactatgatgtactacaagataaactaacctttcctctgtcctctcttttgtataggccgaccagtgcacgcgtctccagggcttcttggttttccacagctttggtgggggaactggttctgggttcacctcgctgctcatggaacgtctctcagttgattatggcaagaagtccaagctggagttctctatttacccggcgccccaggtttccacagctgtagttgagccctacaactccatcctcaccacccacaccaccctggagcactctgattgtgccttcatggtagacaatgaggccatctatgacatctgtcgtagaaacctcgatattgagcgtccaacctatactaacctgaataggttaataggtcaaattgtgtcctccatcactgcttccctgagatttgatggagccctgaatgttgacctgacagaattccagaccaacctggtgccctatccccgcatccacttccctctggccacatatgcccctgtcatctctgctgagaaagcctaccatgaacagctttctgtagcagagatcaccaatgcttgctttgagccagccaaccagatggtgaaatgtgaccctggccatggtaaatacatggcttgctgcctgttgtaccgtggtgacgtggttcccaaagatgtcaatgctgccattgccaccatcaagaccaagcgtaccatccagtttgtggattggtgccccactggcttcaaggttggcatcaactaccagcctcccactgtggtgcctggtggagacctggccaaggtacagagagctgtgtgcatgctgagcaacaccacagccattgctgaggcctgggctcgcctggaccacaagtttgacctgatgtatgccaaacgtgcctttgttcactggtacgttggggaggggatggaggaaggtgagttttcagaggcccgtgaggacatggctgcccttgagaaggattatgaggaggttggtgtgcattctgttgaaggagagggtgaggaagaaggagaggaatactaaagttaaaacgtcacaaaggtgctgcttttacagggaagcttattctgttttaaacattgaaaatgttgtggtctgatcagttaatttgtatgtagcagtgtatgctctcatatcaattactgacctatgctctaaaacatgaatgcctttgttacagacccaagctgtccatttctgtgatgggttttgaataaagtattccctgtcttaaatgaattc

SEQ ID NO: 80 - DNA, 4130 bp, Homo sapiens
gaagctcggtgccggctcgcgcgatcggtgggacagaatttcgttgttttcaccgacgagactggaggaaacaacaccaaatagggataccatgggacaaacagtgaatgaagattccatggatgtcaagaaggagaatcaagagaaaactcctcagtcaagtacatcttctgtacaaagggatgatttccactgggaggagtatttgaaagagactgggtctataagtgctccttcagagtgcttccgtcagtctcagattccacctgtgaatgatttcaaagttggtatgaaattggaagcccgtgaccctcgcaatgccacttcagtatgtattgctacggttattggaattactggggccaggttacggttacgactggatggtagtgacaacagaaatgatttttggaggcttgtcgattccccagacatacaacctgttgggacatgtgaaaaggaaggagacttacttcaacctccactagggtaccagatgaatacatcctcctggccgatgttcctcttaaagacactaaatgggtctgaaatggcatctgccacattatttaagaaggaaccaccaaagcccccactaaataattttaaagtggggatgaaactggaagctattgacaaaaagaacccgtatctcatctgtcctgcgaccattggagatgttaaaggggatgaagttcatatcacatttgatggctggagtggagcttttgattactggtgcaagtatgattctcgagatattttcccagctgggtggtgtcgcctgacaggagatgtattacaacccccaggaactagtgttcctattgtaaagaatatagcaaaaacagagtcttctccttccgaagcaagccagcattcaatgcagtctccacagaaaactactctaatattaccaacacagcaggtcaggagatcaagtcgaattaaaccacctggacctactgcagtccccaaaaggagcagttctgttaaaaatatcacaccaaggaaaaaaggtccaaactcaggaaaaaaggaaaaacctttgcccgtgatatgttctacatctgcagcttctctaaaatcgctgaccagagaccgtggcatgttatataaagatgtcgcttctgggccatgtaaaatagtgatgtctacagtctgtgtctatgtaaacaaacatggaaactttggccctcatctggatcccaagagaatccagcagctgcctgaccacttcggcccgggcccggtgaatgtggtgcttcgccggattgtgcaggcctgtgtggattgtgcccttgaaactaaaactgtttttggatacctgaagccagataatcgtggaggagaagtgataactgcctcctttgatggggaaactcattccatccagctccctccagtgaacagtgcatcatttgctcttcgctttcttgagaacttctgccacagtctgcagtgtgataaccttttgagtagccagccttttagttcttccaggggtcatactcacagctctgcagagcatgataaaaatcagtcagcaaaagaagatgtaacagaaaggcaaagcaccaaacgatctcctcagcaaactgtaccatatgttgttcctctctctcctaagctccccaaaacaaaggagtatgcgtctgaaggagaaccattgtttgctgggggaagtgccattcccaaagaggagaatctttcagaagattctaagagctcatcactaaattcaggaaattatttgaatcctgcctgtagaaatcctatgtatattcatacttcagtctcccaggatttttctcgaagtgtgccaggcaccacaagttcaccactagttggggacatatcccccaagagcagtccccatgaagttaaattccaaatgcagaggaaaagtgaagctccaagttatatagctgtacctgatcccagtgtcctgaaacaaggcttctctaaggacccttcaacctggtctgtggatgaagtgatacagtttatgaaacatacagatcctcagatatcaggccccctcgccgacctcttcaggcaacatgaaattgatgggaaggctctgttcctactcaagagtgatgtgatgatgaagtatatggggctgaagctggggccagcattaaagctgtgttactacattgaaaagcttaaagaaggaaaatacagttaaaaaatgtgtaagtttagattggacataattctcaggtgtactgttaacattttaatttaaaagtatttctcttagcagtttttgttttgtagacagttcccataaaaatattttatcagaattgcagaactgtagtaacagttcagtcaactttgtttttttcctggagtcaccaaccagctttgggagacacagccgccactcccccagtctacttctttaaaaagcatttaacaggttagtattggcatattcaaattggcagttctttatgtctttttaaattttcattgtacagtttacaaatatacttaatgtagttaacagagaaaaacctttgattttggttaacctttatatctagaaccaaaacagctaaatcccaaaggggaaaatatcagggattgacaacttctataattaaatccatgagaatttttcctcactagagaatttaaaggtgcacctgtagatatcatcttttctcagatattttgtgtgatactctgtggtgttctgttcatgttctatcagtatatctagaaagggaatagccatataaattattttccttttattatttctctgtatgttgtatttgatcatatttaaaggaaaaaagcaagcttataagctttcatgaagtgttcttaccagtttttgataaattttttaaattataggatagaattgtcattttatgcaggagatatttatactacgagggttgtttggatggagtcagattaaattttttcagtgaaattcctattattttaaaactttccatattttcactacgcttggacatttaactaggcattcttttcttacatctctatatgaagatacctgtgtccaaaatttttgaagatatatattgtatgtgtttattcttcatatggtactttaccatatttatatattgttttatacctgtaggtttacacacaagtaaatctttttttcttgaatttaatctgggcactttgcactgccacaggggtgacgatggaactatgtatatagttaggatgttttgatttcggtaaaaaatatatgtcccatcgttgctatcaccagtacctctcagcttactcttcaggggatatgaaacaatctgtagattgggtttccataacagggaagtccgtcctaatgccaagtttctaattaatttgcttagttctgagccatttattctgctacactttgaaagatatattagttctgacttattgttggggctttattttatttttatttttttgagatggagtttcactcttgtgcccaggctggagtgcaatagctcgatctcggctcactgcaacctcgcctccctggttcaagcaattctcctgcctcagcgattacaggaatgcaccaccacgcccagctaattttgtagagatggggtttctccatgttggtcaggctggtctcaaactcctgacctcaggtgatccgcccacctcggccttgcaaaatgctgggattacaggcatgagccacctgcccagccatgtttggggctttattttataagttagaactttgaagaggaaatggtgctatatgtttattgttattactttgtgtaactttgatgtaatgtttataagctatgagaatcagttataaaagtattagccatttgttgtaaatgccaataaaatattcaccaggggcaagaatgtacattttctttttagaaaaccaaatgtactttagacatgaatgcaactatttaaagaatagcttcatttatgttattccttacatgtcataagattcttacttaaacttggtcttctttcaagttgtttgtatgaagatgctgtacccacttgaacagtcctcaggtgtttacataaatactatgttttacagttttcatattttaaaatattaataaagttaatcgcaacgattc

SEQ ID NO: 81 - DNA, 4910 bp, Homo sapiens
tagacgcaccctctgaagatggtgactccctcctgagaagctggaccccttggtaaaagacaaggccttctccaagaagaatatgaaagtgttactcagacttatttgtttcatagctctactgatttcttctctggaggctgataaatgcaaggaacgtgaagaaaaaataattttagtgtcatctgcaaatgaaattgatgttcgtccctgtcctcttaacccaaatgaacacaaaggcactataacttggtataaagatgacagcaagacacctgtatctacagaacaagcctccaggattcatcaacacaaagagaaactttggtttgttcctgctaaggtggaggattcaggacattactattgcgtggtaagaaattcatcttactgcctcagaattaaaataagtgcaaaatttgtggagaatgagcctaacttatgttataatgcacaagccatatttaagcagaaactacccgttgcaggagacggaggacttgtgtgcccttatatggagttttttaaaaatgaaaataatgagttacctaaattacagtggtataaggattgcaaacctctacttcttgacaatatacactttagtggagtcaaagataggctcatcgtgatgaatgtggctgaaaagcatagagggaactatacttgtcatgcatcctacacatacttgggcaagcaatatcctattacccgggtaatagaatttattactctagaggaaaacaaacccacaaggcctgtgattgtgagcccagctaatgagacaatggaagtagacttgggatcccagatacaattgatctgtaatgtcaccggccagttgagtgacattgcttactggaagtggaatgggtcagtaattgatgaagatgacccagtgctaggggaagactattacagtgtggaaaatcctgcaaacaaaagaaggagtaccctcatcacagtgcttaatatatcggaaattgaaagtagattttataaacatccatttacctgttttgccaagaatacacatggtatagatgcagcatatatccagttaatatatccagtcactaatttccagaagcacatgattggtatatgtgtcacgttgacagtcataattgtgtgttctgttttcatctataaaatcttcaagattgacattgtgctttggtacagggattcctgctatgattttctcccaataaaagcttcagatggaaagacctatgacgcatatatactgtatccaaagactgttggggaagggtctacctctgactgtgatatttttgtgtttaaagtcttgcctgaggtcttggaaaaacagtgtggatataagctgttcatttatggaagggatgactacgttggggaagacattgttgaggtcattaatgaaaacgtaaagaaaagcagaagactgattatcattttagtcagagaaacatcaggcttcagctggctgggtggttcatctgaagagcaaatagccatgtataatgctcttgttcaggatggaattaaagttgtcctgcttgagctggagaaaatccaagactatgagaaaatgccagaatcgattaaattcattaagcagaaacatggggctatccgctggtcaggggactttacacagggaccacagtctgcaaagacaaggttctggaagaatgtcaggtaccacatgccagtccagcgacggtcaccttcatctaaacaccagttactgtcaccagccactaaggagaaactgcaaagagaggctcacgtgcctctcgggtagcatggagaagttgccaagagttctttaggtgcctcctgtcttatggcgttgcaggccaggttatgcctcatgctgacttgcagagttcatggaatgtaactatatcatcctttatccctgaggtcacctggaatcagattattaagggaataagccatgacgtcaatagcagcccagggcacttcagagtagagggcttgggaagatcttttaaaaaggcagtaggcccggtgtggtggctcacgcctataatcccagcactttgggaggctgaagtgggtggatcaccagaggtcaggagttcgagaccagcccagccaacatggcaaaaccccatctctactaaaaatacaaaaatgagctaggcatggtggcacacgcctgtaatcccagctacacctgaggctgaggcaggagaattgcttgaaccggggagacggaggttgcagtgagccgagtttgggccactgcactctagcctggcaacagagcaagactccgtctcaaaaaaagggcaataaatgccctctctgaatgtttgaactgccaagaaaaggcatggagacagcgaactagaagaaagggcaagaaggaaatagccaccgtctacagatggcttagttaagtcatccacagcccaagggcggggctatgccttgtctggggaccctgtagagtcactgaccctggagcggctctcctgagaggtgctgcaggcaaagtgagactgacacctcactgaggaagggagacatattcttggagaactttccatctgcttgtattttccatacacatccccagccagaagttagtgtccgaagaccgaattttattttacagagcttgaaaactcacttcaatgaacaaagggattctccaggattccaaagttttgaagtcatcttagctttccacaggagggagagaacttaaaaaagcaacagtagcagggaattgatccacttcttaatgctttcctccctggcatgaccatcctgtcctttgttattatcctgcattttacgtctttggaggaacagctccctagtggcttcctccgtctgcaatgtcccttgcacagcccacacatgaaccatccttcccatgatgccgctcttctgtcatcccgctcctgctgaaacacctcccaggggctccacctgttcaggagctgaagcccatgctttcccaccagcatgtcactcccagaccacctccctgccctgtcctccagcttcccctcgctgtcctgctgtgtgaattcccaggttggcctggtggccatgtcgcctgcccccagcactcctctgtctctgctcttgcctcgacccttcctcctcctttgcctaggaggccttctcgcattttctctagctgatcagaattttaccaaaattcagaacatcctccaattccacagtctctgggagactttccctaagaggcgacttcctctccagccttctctctctggtcaggcccactgcagagatggtggtgagcacatctgggaggctggtctccctccagctggaattgctgctctctgagggagaggctgtggtggctgtctctgtccctcactgccttccaggagcaatttgcacatgtaacatagatttatgtaatgctttatgtttaaaaacattccccaattatcttatttaatttttgcaattattctaattttatatatagagaaagtgacctattttttaaaaaaatcacactctaagttctattgaacctaggacttgagcctccatttctggcttctagtctggtgttctgagtacttgatttcaggtcaataacggtcccccctcactccacactggcacgtttgtgagaagaaatgacattttgctaggaagtgaccgagtctaggaatgcttttattcaagacaccaaattccaaacttctaaatgttggaattttcaaaaattgtgtttagattttatgaaaaactcttctactttcatctattctttccctagaggcaaacatttcttaaaatgtttcattttcattaaaaatgaaagccaaatttatatgccaccgattgcaggacacaagcacagttttaagagttgtatgaacatggagaggacttttggtttttatatttctcgtatttaatatgggtgaacaccaacttttatttggaataataattttcctcctaaacaaaaacacattgagtttaagtctctgactcttgcctttccacctgctttctcctgggcccgctttgcctgcttgaaggaacagtgctgttctggagctgctgttccaacagacagggcctagctttcatttgacacacagactacagccagaagcccatggagcagggatgtcacgtcttgaaaagcctattagatgttttacaaatttaattttgcagattattttagtctgtcatccagaaaatgtgtcagcatgcatagtgctaagaaagcaagccaatttggaaacttaggttagtgacaaaattggccagagagtgggggtgatgatgaccaagaattacaagtagaatggcagctggaatttaaggagggacaagaatcaatggataagcgtgggtggaggaagatccaaacagaaaagtgcaaagttattccccatcttccaagggttgaattctggaggaagaagacacattcctagttccccgtgaacttcctttgacttattgtccccactaaaacaaaacaaaaaacttttaatgccttccacattaattagattttcttgcagtttttttatggcatttttttaaagatgccctaagtgttgaagaagagtttgcaaatgcaacaaaaatatttaattaccggttgttaaaactggtttagcacaatttatattttccctctcttgcctttcttatttgcaataaaaggtattgagccattttttaaatgacatttttgataaattatgtttgtactagttgatgaaggagttttttttaacctgtttatataattttgcagcagaagccaaattttttgtatattaaagcaccaaattcatgtacagcatgcatcacggatcaatagactgtacttattttccaataaaattttcaaactttgtactgttaaa

SEQ ID NO: 82 - DNA, 127917 bp, Homo sapiens
gatcacttgagcccaggagttcaagaccagccttggcaaaatagcaagaccccatctctaaaaaaaaaaaaaaaaaaaaaatccaggcatggtagtgtgcacctgtagtcccagctacttgggaggctgaagtgagaggatcacttgaacctaggaggtaaagtctgcactccagcctgggtgatggagcaacactctgagagcaagacactctctgtctgtctgtctgtctctctcttgcgctctctctctctctctctatatatatatacacacacacacagacatgcacacacatatatgtatgtatgtgtatatatatgtgtgtgtgtgtatatatatatatacatatcagatttttatatctatttctaaataaaactcttgttacataggtacccatgagagcctgaaagaattcctgtcacccattctccatagtgacagtcatctataaaaaacaacttcggttaaccatgaggatttgagaaaatgtaattgaacagaagttgatattgatcaccccaaaaccagggggtgtccctaaagccaaatgaagaacaataatgtagcaacaaaccatttttttaagccacttggacaaggtccatttgaggtgtttgcctcatgcctcacttatgggaggagcggcaggctggggtatgggtaagctccagggccctggcagcagcctactgagcagttgtttctacaagtatcataatgagctaacagcaaacctctggcttctccatgaggtcattgtcgggggttggaggtttctggtagatgatgcatgttgtcatcaacaggtgtttgtctattgaatgagtttattcattctctctgatttggtgttaactttgactctcctaacatctttgtttcttatgcttcaccagaagaggagagtaaggctggcacaatcttggtggccagctctatatcttagatccgttgctttctatgtctcatgatttaagacttatgacattgacctacactgacatctgcatactattctctgctgcttctgtaacctgcttctaccttgttagacgtgtctgcctctgaaacacatttttcttttccacttcatccttctgctctctccagccccattgtcctttgtgtcagattcatattcatgatccacggttagacaacacaacttcctgcttcctcatgctgtctgtcccatgttagccacacagccagcatttcctgcccgaaacctcatcaggacgaggcacaattacactgcagtttctcttggctcctttactctttatccttaattcagtgttttctcaaagcgtggtaccctgaccagcaaaaggagcactaacatcacccaaggacttattagatgtgcacattcttgggtctcacccagaaactactgggtcagaagctctgggggtgaagcccagcaatctgttttttaatagcctccagcgggttgctatgccagctacagtttgagaaccactgtcttaacccatgtctcatcctgccttctttcttcctgctgtttgcattttactaattctaataggaagcagctcatgattggaggttattgtgtaccatttttcaaagccattatcacagatgactttagaagttcatgtaaaacatcagcataatttccaacactcagtgaacactgtctcatccacactaacaagatggtgatgacctagctagatggggatacagataatgcctaagcctcaccttagtgaggcaagttacgttcttcctggggagaattttttaataatgtgaattttttaatgctggtaaagatgctaataaacattatcaattggctgggtgcagtggctcccacctgtaatcccagcactttgggaggccgaggtgggtggatcacttgagtcaaggagttccacatgaggctgggcaacatggcaaaaccctgtctctacaaaaaatataaaaattagtggggcatggtggtgtgggcctgtggtcccagctactctgggggctgaggtgagagtatcacttgagcctgggagatggaagctgcagtgagccatgttcatgccactgcactccagcctgggcaacagagtgagaccctgtctcaaacaaacagcaacaacaacaacaacaaacccagtactgatatataaatagcaggacatggagagactagtcttcaaattcataacacttggaattaccaagcattaggaattcccagataattccttagcttaatgatgggtatatacagcccattacattaatgtttcgtgtgtgtgtgtgtgtgtgtgtgtgtgtgtgtgtgtgtgtttaaaaatgtcataataaaaaatttaaaatattacttaaaagtggcagtattactccatccttaaatgaatccaagtaaaatagtttttacttttattgctacccatcttggtcataaatgatattaataatgaatttgtacttattgaatggttttcatttctttctactagatatgtatacacatatatggatggatgggtggttgataggtaggaagataggtaggtaggtaggtagatagataagtagatagagatagatagatagatagatagatagatagatagatagatagatagacagaacaaggttatcaatattaatgttgaagaaattgccaaaagctaaaatatgtgtatggtctgtacatttcttctaattgtgtaaattggaaaatcctttaataaaacaatttcacaggatccatgtatgtgtcagtagacattggaatattaatacatgaaaatttcatttactggaatttatcctaaagggggagaattctaattgcagaaaaattgtatgcaagacgatggtcctcactgcatttttttcataatagcataagtctatccctttgtgaccaaccaaatgggagctagccaagtaaatattgatatatagtcatccagtataatcattaagatgatagttatgcttataatagtatgggggaagcaagctataaaacttggcacacagtaagattacaatcttgaaaaacatgttcaaaaagaggaaactgtttctgttaggtagggtggtgatatgattagtgtcttacaccttcttctcctgtttttactttttcaaaggaaatgtgtatttagcaattataacagtggagttcccaagcttatttcctctccaaagtggtttgggcctttgtgatttagccacattacttttaatctatagagagcccaatttttcaagagttagtatgtcccaagaggagcaagcaatattgcttctctgttaccagccaagcccaggattcatggagagagtctagagtcatccaaccgcagttacatctcttttttctaatgttgcttctatggtactcttaactgttaaaatgtatggcaatcatttgattgcatccttcccccaaagaagcagaacttggcaagagccctgagacctccgtcccctctggttgtctcgtccagcacttttattatactttggaacatcaagaatcaaagcggtttcctagagatgtgttaggctgaatgacagctgcatcattattccaccaactgggaaattgaaacagagttacttcccacggcatctgtttgaacatgctaaataaaggcacgttaagaagactggggagcatccatgatgggatagcgacacactgacgctcagcccttcccatcccaaagactcccagttcatctgtgtgatttccattgcatgggcttacagtctgcactgcttttgctttcttattaattagtaatcatcatattattgatcccaattataataacttttactaccattttgggcatataaaaaagcggaattaaaaaaagaaaaaaaaacacactcttcaaatgctggtgctttacactgtccgcttcagatgatttttttttggcattcattatattttttctatgcttatagaagattcaggtcaaacaccatatgcccttgaatcatatgctgtttcaggcctgttggtttgttgattattctgttaaacagatattcactggacggactctaatcgggcgggggtgggccaaggagggattctgtgccaccatagatcagtgatttataaaattaaactagaggtggaacatagcaaaaaggaaaggattatttacccaagaatcaccttggagtcacttaactgtttcttttctacgagttgtcatcttgcttctggttttaagtcggataattgctctgctggtttctgtttctgactcggcagaacttagtctttcatctggtgtttattcatctcgctggaacagctttcagtcctctttaaaaattaatttgactttaatgtctagttatctaagactcccctgggctaggatgaaatcacacagggggaattgtgatttgacaaatggccattgtatgggagcctttgatcctgcaccgtggtccttgttttgctgagctttaagcaacatcaaagtctgcactacgtggcgtgattggtggtcggcaccgggagaattctggcacttcccagcatcgctgagtggctgcagcctgttaggtgcagatgagagctgtcctaatagtttatccaagtagagaaattggaccagggtggaggcaaacagaagacaggaccttggtgcgtgttgaatgacatgaagccctttgctccctaaagtaggaattcccaatcctggtcttccaatctctgaggcttgctgagttttttcccaagtttttagaaattatgagaaaaaaataattttaatttactttttatttttaaaaatacatagaaaatggccgggcgcggtggcttatgcctgtaatcccagcactttgggaggcccaggtgggcggatcacctgaggttgggagtttgagaccagcctgaccaacatggagaaactccatctctaataaaaatacaaaattagccgggtgtggtggcacgtgcctgtaatcccagctactcaggaggctgaggcaggagaatcgcttgaacccgggaggcggatgttgtggtgagccaagatcatgccattgcactccagcctgggcaacaagagtgaaactctgtctcaaaaaaagtaataataataatacatagaaaacgtgatggattcgggttagaaagacacagagaaaacaggcaaaatgctgaagatcattggaaatttttgccctgatgattagacaacatatctctaacgatgaaataaatgtcttaaaagcaaaataacagatgttggtttcagaggctgaccttgattgttcagcagcatctagactcagcaggcgggaagtgccactctttcttgaaaggcagacattgtctaactctgcaatctccttttctctctgacagatggggaactctctatatccaatgaagaggactccctagaaaatgggcagtccctgagctccagccagctgtctctgcctgccctgtccgaaatggagccagtcccaatgcccagggatccctgctcatatgaggtgctccaaccgtcagacatcatggatgggccaggtaatgccccggcaggattgtagagcaggtcccagacaccaagtccagccaggcaccagggatctttggcctggctggacttggaattctattttggactatcctgagcgtaaggatctggaaatttagtgaaacagattagtttttagtacatactgagtatttttaaaaatggaatatacttacacttattatcctacagtgtttaaaaaactctttactaccttaatctctttaaagatgatatggcttatttttgtaacattaatgatttaaaatattattattttgttttttaacattcatctctgttaagataaagctgaggaatcctacatttctatatgatacctatctaattcgtctgtctgaaaggtcctttagtcttagtcccagtatgccagttaatacttgtatcaatttactggatatagtcaattaatttaattgtctattaaactgtatataatttactgattgaattgtatcctgctgatagctgatttttgatgccatctgactgtcatctccttctttggtccaaaggtggctgagtggccaatactcatcctctcagaaggtttgcagagcggtcctaatttgccccaaaataggtccctcctgacagctaatgagcagtggtacttgtcaggagatgagtctgggagaaggaacctcttgcaatatccagagtatagatagaaaggcctctctccccatcatgtgcaaaatccacatccataggcagtcacgtgggagggtgggagggatgaggtttcacagggttaattcccatgcttcgttatgggacccggtgagtcattgctccatcactgtgtgccacattgacaataatagtgtccctgaggcaggagaatgtagtgctcatgaggattttcagcagggctttggtgctgcacagaacacctgatcagggaggaggaaggagggtggggaggggaggagtcccttacaggctttctcactgaggcggtggcgggaggtgagaggagatgcagtggagttacaccctcccaccccagggagggtttcccaatgaaagcagtgcttttttaaaaagaatccagacttccttgtgacactgaagtcagatagatttgactgttatagtaaaaatctgtcattccagcagaatcacagagtttcaatctgtcatcagccaagctaccggcatgataggaaggtgtgtgccaccacccaatgacaactcttcatgaaagccagtcaggggttcccccatgaaagaaaggaagaggcgcgtccaatgcagtgcaaagagaaatggaggaattgataaaagaaaactatagttgtggtgagcaagaagagagaggaaaggggaagatgaaaaggttgatttaaagcatcccttgcctcgtcaaagtttacaggagctggtgggggcaggatgctgttgctaaaactacagaatttgggctgagaggctgctgctcagcgccgggcactccagaacctggaggagcagccgtccagtgcctggggtgcagcctatgaggtgtcagcgttccaggctgtcatctgtacccagtgtcgcagatttgagagcagagacagagcggacccagtggacaaaactgagcccctccacttgtttgaatccactccctcttgcccctcagcaaagggcaagcaggccccagcgaggctgctggcattcagttctggtttggtttagaggggctctgcatcctgggccttctgcactggccaccctggtgattcctgctgtgccccatgagtcccatcttagagcatgtgtagggtttgcatgaccaaagctgagtttgaaatggtcaagtgtttgatggttttgagaaaacatcctcctcctctttctccctgttgctcttcccgcctccactctctctcttcctctgcctcctctctctgtcctcctgcttcactggatttctggcctcctcgctgtagctctctacacatgcgtggcggcctgaagcatcggtgctccgctgtgttgccagcccgagtccctgtcctgtgttccccgctggccccgcctgcactgcgtttgtgtaatgtctcctgtgtatcatgtggttgtcccctcagtgtctgaagagagtccctctgccagtgagtctggagtcctcctgtcccaagatccttcagccaaaccagtcctgctactgccccccaaaaaacctgctgctttccctggagaccatgaagagaccccagtgaagcagctgccccttctcaagcagcccccggccctgcctcccaaacccactaccaggattgccaaccacttaacaggtgagtgcagacgtcttctggggcaagcagtccctccttcccttcaagggattttctttttctcttgttctttgaactgaggcctgaaggcagctctctggggaggttgccctgtgggatgtttgggtgtttctgtgtgtgtcttgatatctgcagtcatgaccagggtttgtgtttttgtgtcaagcagcatttgatatccacctaccagccatatgccaagagctttcagtcatgtgtatctgtaaatgtgtacattgtatttaagtgactaattcaagattatttgctcatctaggtgaaatcgattcaatgtcaacatttttgcaaagataaagaatagtgccttctccatatgagtatgtcaaggttttaaattttttgtctttaagttattgatctgaagcccagtgtatttcacctattaaaattcatgtcagtgctgtctgttctcttagggaaaaaaaaaaaaaaaagacaatctgcaaattatgtggtaaatacttttaaaagaagagtaagcttagcaatgttgttctaaaatgattgcacacgtcctttgcagtgtttctgaagtgttacttaatgaatgtagccacaggcattaaattgagcactcagtgaaattgtacttcactgcactttggcacatgaattagataccactttgtgattgaaggctgtggtataatcagagattaaaatatttcagagggtcatttctccaactttgataatagtttcacctgatgctgatcgactgcctttttaaaaagcactcggtattttgacaaataatacctaggtaatcattgtaacattttgtaacatgtaatgggggtggaattagggaaaaatattcacctatcttataggagaaacactgaggttcaagaaaaataagtgacttccagggctgacaggaattctgtaatagaggcacaatcgatgctatatttctcaactccgagttcagctaatgttgtttccagagcaggctgtctttcacgtgatactgagttctataagagtccatcttagacatgggctcatgtcaaactaatctattaatgtgtatgtccatccaagtcagatgtgtatggcttgaaagagcaaatttccatcaaacggaaccatctaacatatcaataacacttttgttcgatgtccaaaaattgaaattcacagaaaactacaaaggagaaaaggtcccataagcctccttctaggcaatatccactgtccatctgtctgtctattgaataaaaattgaatgttgctgtacgtattgttttgtcacctgctttttgcacttggtgatatattgtaaactgattttcgtgttagtaacaattccacaacgtgattttattagctgcttggatggatcagggtttacttgactgaccccttaaagtttttccatcttccttattgctaaatcgcaacagcaaacaactgcaacagcctgcatatatcttcataagcacttctgagttttctctaatttatttctaaaattagaactgttgagtcaaagattatgcaccctttaaggctttgatgtcaaatttcccttaagaaagattaaacattgtacaaaataaacccctacatgtagtacatatttattcaacacatctacaataggcagaatactgtactaagtatcaaagtagataggaatatgtaacagtttaatgcagctgtcctcaacctttctggcacgaaggaccagttttgtggaagaccatttttccacagaccggaggtggggcgggagagattatttcgggatgattcaagtgcattacatttgttgtgcactttatttctattattattacattgtaatacataattaaatcattatacagctcaccataatgtagaatctgtgggagccctgagcttgttttcctgcaactagacagtccatctaagggtggtgggagacagtgaccgatcgtcaggcagtggattttcataaggaacatgcagcctggattcctcacatgcgcagttcacaatagggttcgcgctcatctaatgctgctgttgatttgacaggaggtggagctcaggaggtaatggtgagcaatggggagtggctgtaaatacaaatgaagctttgctcactcacccgccactcacctcctgctgtgcagcccggttcctaataggccgcggaccagtacaggttcatggccctggtggttggggacccctggtttgatgaatgcatatatatacgtagagagagagtactaacacaactactgttagcagtaacacttgcaattcaatgcagtctgataaagagaaggctgaagcttgaactgacttttcaagcatgaaggacatttatagaaaatgagggaagagtattccaggaaagaagaccctagacaaaacctcagaggtggcaacattttgggtcattgaagagttggctgagtaggggtggaagcttcattctgaagtatactgagagacaggactcactagaaaaaggcataaaaagatttagattttaatccctaggcagtgaaaaaactttggaggtttttaagcagaggagtgatatgatgaaaactagcctttaagagatcttggatcaccatgtagaaggagcagaaagaggagcaggttgaaggcctatcagagaagccaccaccaaggctagctctaggccatgcactccaaagtcagatcagctaaatggactcagccatgggataccattgagccagggataccctgagccacggataccattgaagaggcttctccagtcattgaaatatgagctaacaagcatctgactgatatcagtgagaagagagagagcaaaccagtagatatgacattgtaaaaagaagagtcagcagaatttcttaactgacgacacctctgatttatctagttatctcattaatggagacaaacttaagtttcatctatgagcccaggagctcaggtggcctggtatccacagggttctttacatatgagagaccgaagatatctcaattggccccatctctctggcttccctggtcctttcctgagagagtagactctgttatctatatgcctcacctctatacagcttggatcaaatgaataaaaatacacaaaaagctaatatccttactatgtagtacctggtaacctcttaaacatgataaagtaagacaggtggagaagtccgtggactgcaaatctagtgctatccttttgggcttaaactcaattagacttgcttaatttttataagtgagcaatcagttataatgaatctgcatcaccatgaggtagctacattaaccctgttctgttactaattgctctgaagacatctgggccatgtcagaaggaattaataaactaagaattctagaactctaaattgagactcatgagttttagcctgttctcagtgtctgctgctctggtgacatgtttgaaaggaaacacaggacaattgaaagacaccaagcgtgattaatggggagtgacagtggctaatggtctggtagaatgctggaggaaatgtgaggctgaactggaactactaccaaattcacagtcagggaaagtcatgcagaaatacctctaccgtggcgtttgcttccactttatcaggaaaatgtaattaatttggagagtatttgtcttacaaatttcttctgttcatcagccaggtggggagaagttctctcattctccctgtctgtcttgcttcatttcttgttaaaatctccttccatctcacctcctccaacatcaaccatgcaacagcatgcgatacagggccaggagttgttggcatcagtttcctttgtttccagaagtacagtgtccgacagagcttgttgtgtaatgaatgtgatctgaagtgaaatgcatccttcttggaatccttggagtgatgggtgaccccaaaagggtgatgaaggcaaaagccactgtctcctgcctctctaagtcatcatcagtcacttctctgtggcattctggctccagaagtcagatgttcaacgctgcatgaataacctatgccttctgcataaggtacctgtggcaggtgcccccggcatgccagttgaatgaaggataaatcaatttagctggacttcacagtcagatgttcacatttgggtaataataatgtcagccttttttgagaactttaccacatactctttgatattgttatcattattacctcttttcacagatgagcatgaaatttggagaaattaaaggacttggtcgtagttacttagctagtaagtggcagataagcatgaacctattttttttgactccagaatcctcatttataaccatttgtttatagtatctccaccaaaattcccacccccccttttttttttctttttttgagacaggatctcactgtatcttccaggctagagtgcagtagcacaatcacggctcactgcagcctccacctcccaggcacaagtgatcctcctatctcagcctcctgagtagctggaactacaggcacatgccaccacgcctggctaacttttgtatttttttgtagagaaggaatttcacaaagttgcccaggctggtctggacctcctgagctcaagtgatccacccatctctgcctcccaaagtgctgggattacaggaatgagccaccttgcccggcctattcccaaatctttaaaaaaatcagctttctttgtgttttagcattgtatgttttcatctgcttaagaagtttgaaaatcggcccctttgtttttaaaagttgtgttattctgcttgggctgccgcaactaaagaatgtagattgggtagtttacacaacagaaatgtatttctcttagttctggaggctggaaagtccaagatcaaggtccgtagggttcggtttctagtgacatatcttttgctggcttgtagacagctcccttctctctatgttctcacataacagggagagagaaagagatctctgatatctcttctgctttttttttttttttttttaaaacagtttctactccgtcgcccaggctagagtgcagtggcatgatcttggctccctgcaacctccacctcctgggttcaagtgattctcctgcctcagcctcccgagtagctggaattacaggcttgtgccactatgctcagctaatttttgtattttttttttttttttagtagaggtggggtttcaccatattggccaggctggtctcgaactcctggcctgaagtgatctgcccgcctcagcctcccaaaatgctgggattacaggcgtgagccaccaagcccggcttgatgtctcttcttataaggacattaatcttatcatattagggttccatcttcattgcctcatttgaccttgattacttccttactccaaatacagtcacattgggggtgagagtttcaacagatgaatttaggaggtggggggacacaattcagtccacagcatgactcaaggacaaaaattatctagttcttcaaaaattagtcatatactcaaggcacttggttataaagaggaggatctgagttcagttgggtcgggtttcaaagaacagacccaaaggagacagtttgtgtaagagtcaggagcaggggtaaaccacatgggaagcatctgaccacagttagagattactgacacttcagcaaagaaaggaaactgaggcttatccttgaaaacaagtcctactgataatacacacctacccaggacttatttgcacagtggttagaattcaaaatacaaggaaacttaatatattctcagaacttagttgattgctcatttcaatgttaccaaagtattcgctactacaactttgcctgacaaatggtgtccatgacctgtgttattttcagccccagcatgtgtacctgtgtaacaagaatcctctctccatgcttgaccaatattcctggttatagctatctctctagttttgtggactttttcactgttctacagtcacatgctgctgcgtaatttcattatgtgtctctgtttttctctgatgctctctctcccccattgatccccacattcccaaccctccatgtcctcctctccaaccctccagaaccacctggctacttctgcctctgtccctgccttccctcccagtaatcccagtgcaataaaaccaaagattagaccactgtgagcttggactttatctatgcctttaaatggaaaaaaaatgaatgtttgcatagaagtctctcttggtaactgataatttgaaggtgttctgtgttctttgtgagatggtcggtcaagtgcagccataaggtttattatactcacgggccctagagacaggaggcacggctcaccacacagggcacatggggaagcctcagggtggtcaggaggcagaaagcaaggagaggggaaagccgaggccagagtgtttattggggtttctgcagaaaggcaaagcagggcagacagagcactttaggactggctagtttgcatggtgtcagcaggctctaagctatacaaatgttctatagttgcctggtacctggccatgggatgattaaggcagaggaataatgcatcctggggtggacaggcctgatagaggaagtctggctctggactggcttgtttccatatcaaagggctgctcctgacttggcccttgctaactctgagaattggtcagccccaggagggacagtctccccagccagaaaggtttttaagatgtcaaaactcatacaaaaaataaaaaatggaaacaacacagaacgaatgggggagttagctgattttactttttatactcacttttctacccatttctccatgtttttccagtcttgtttctattctcaaaatgcagaagttttttttctgcagtgcatacaaggactatctgttgattaaaacagtttttaaaggatgctttctgctctgatttctataaccagggcaaagagcgtagcaaaatacctgtcttttttgtagcactgttaggttggagatttaattcactcagcacttatgttttcaatgcctgctatgtgcaaggtgttctgccagccctcatacaatgtacaaaaatggttaaggccatcagcgggaggagctgcaggctgtgataagctacagaaaatgtttaataggaggagatgtaaacatggctctaaataaattcaagtataacaagtcaaatccttttggaggaatcaagaaaaagcatcattaaggaggagttatttaagacaagccttaaagatgagtgggattttgacaggtaggattggaggaggaggttgttcttaaacaagatgcaaaggacacacaggcacgtgggtacaaggcttattatgttcaagaaatagcaaatagtcctatcagcagggatgtaggattcttgtggtgtagtaaggaaaattggggctgaaaagtggattgtggtgaaactgtggagagctgtgaatgtcacgaggaaggatttaactttgtagaaggaagttagcatcttttgtgcactttttagcagcaattgcttgatttcagccaagcatgtctctcaattgttcctgtgaataagatggacagtaatgctgttcgatggatttataactggatgtataaataaactggggcatgtccaacatcaacatgaaattgcaaagggcaccaagcttccttccttttgcatattttctaaacatcccaggggtaagtttcatgagggcagggatttaatctgatgtgttccctgctgagtccttagctaatgctgaacaggaggctttgtgagggagagaagccctgttgctgaaggaggagtttgatgatcttttgcctgtatcttcatagcaggatacttgcattttagggaagttagcaaaatgttctccagttctaagttctgccataaattaaccctgattcccctgtattctgtagtgtttgaaggaaacatgataacctagatgtaaaagcaacccctttaaagagtagcagttagaacatgacagtcatccatattggtcaaactcatggtccagccgtagttctcaggccgtacactaagaattttggaaggaaacaggcatgctcttacacacaccaactacagacagttagaccagccattaacatcattgtaaatgcaaaaaatacgagtgtgacctccaacagtgaataaatatcatcctgcatccaagagatgcaaggtaagagatgagctgcagccatccttgtttttcctttaaagtatttatggatctagcttgaacttacactgtcaccatgaatattctacctcttaatagctctctgtgtatatatatatatatatatatatatatagttttggggagtgtatgttgagatgcggtctcactatgttgtccaacttggagtgcagtggcatgatcatagctcactgcatcctcaaattcctgggctcaaatgatcatcccacctcagcctcccaagtagctgggactataggcatgcgccactactcccagctaattttttaaaatttttttagagacaaggtctctcgatgttgcccagactgatctccaactcctgggctcaaacagtcctcctgcctcagcctcccaagtaactgggactacaggcgagatctgccacatccagctcagtattttcttttatatgatctcaatttactttcaaacttcatacgtctatctcctgttttgcatgttttgagagcagatgaatgtgtcgatgctcaccctgatgacgtggtgactttgatttgattccctatctgcttggatgaatgaatgatcctttcatctctccatctctgcatttctcaccctcctttatgcctgtcctgcagaaggcccaggttcaacagcacagtgatcaattgaagggcattcttctcttccggtctccctaggagcagcagcaccagtccatggctgcagacataaacaatatgatgtgtttttatataggtgatttataatttctcacaaaatacttactgatcctctcaacaggtgtttgttccatgattagaaggacatctaccattttgactctttgagagcagtttcctgggctgggcgcgatggctcacgcctgtaatcccagtactttgggaggccaaggtgggcagatcacgaggtcaagagatcaagaccatcctggccaacatagtgaaaccctgtctttactaaaaatacaaaaattagctgggcgtggtggcgcgtgcctgtagtcccagctactcaggaggctgaggcaggagaattgcttgaacccaggaggtggaggttgcagtgagccaagatcacaccactgcactccagcctggtgacagagcaagactccgtctcaaaaaaaaaaaaaaaagaaagaaaggaaaaagaaaagagagcagttctctggcaatgaatactgtgtaattttattgaagaaaaaaaaaaaaactaactgaattacatgccctgcaagggtgacgtgcctaagtgactcagttagctggagagtgactctcctctccagtccttccctactcatggccatcttcccagggtacatttaataatggattgtatatttcaaaattgccaagacagaagattttaaatgttttcactgccaaaacatgataagtatgtaaggtgatggatttgttaattagcctgatttaatcatcccacattacaaatatgtatcaaaatgtcatcccatgaatatctacaattattatttgtctagtaaaatttttttttaaatttaatgtttctttgtagaaagcggctctgaaactaagtcagctgagggtgccagggttgtgtatgttatcatggcccttgaggttatgattccagatctgaggacggtcctcacggaggccagatgtctgctgtggttttcacatgctgacctggcttggaagggaaagccaggtttggggcatttcacaaaaataacatttttttcattactcttgtttctctcaacatcatccctctcaccacaaggggtcagtcagcacattttgcctttgaccaaggcaaaacgccaggcgagtgatcatccctaggcgggcctcgtgttctgaaggaactgatggagctcctgttgacctctttcttgcagccaaggggaatctgatttagtagattagtgatgctagactctcatttctgttccagatatactgccaataggccctttattatagtccaccatcttcaggtggagtacctatagctaaggttaagtaattaaaggagataagtaattccaactcactgcaactagttggcaaatgactgagaaaattttgcaacacctttattcattgggcactaagtgctgtgctcattgacaagtaactgccgatacagcagcagttacaaatgggcctctatagcaggtgctgattaaaaagttcatttgtggcctggcgcggtggctcatgcctgtaatcccagcacttcaggaggccgagatgaagggatcacttgaggttgggagtttgagaccagcctggccaacatggtgaaacccccatctctactgaaactacaaaaattagctgggcgttgtggcgagcacctgtaatcccagctactcaggaggctgaagcatgaaaattgcttgaacccagaaggcggacattgcagtgagctgagatcgcgccactgtactccagcctgggcgacagagagagacaccgtctcaaaaaaaaaaaaaaaaaaaaaaagttcatttgtggtggtaagaagagaggttagaggtgtatttatttagtccacacttattccgtgtgtcggctacagccatacggcacaaggaccaactttagaagtcatctttgctttttctttccttgtctgaagtcatcagccagggctgtgtcaggtttggaaatacagccctcttgggttttatggctctgtgacattcacggtttgggtttattttccttgttctctggaactggtcgtttttgcttcttccactccatcaacagagacagttttatgaatacactgcatctcaatcagtctagctgcagaaataagtcagcaagcagagagctctgtgtgtttcccagcaggagcagccaccatcatcattagaaaggcaagaagtagtgtgtatcctccaacaattaataaatatcatgcatcagatagatgcaaaaccatttattcagtgaggtgctgtcaagggaaaggaggcatttttatcccaggaatcaagggaaaggaggcatttttattctaggatctttagaggtaaagagacaaaatcccaggaaggttagatgtcttcctcaggcagttaaaagcaaaggacgcaggttttcagactcctagatcatccactggttttctttctttttttttttgttttttgagacagagtctcactctgttgcccacggtggagcgcagtggtacaatctcagctcactgcaacctccgcttcccaggttcaagcgattctcctgcctcagcctcccaagtagctgggactacaggcgcatgccactgcgcccagctaatttttgtactttttttaaagacagggtttcaccatgttggtcaggctggtcttgaactcctaacctcgtgatccgcccgccttggcctcccaaagtactgggattacaggcttgacccactgcacccggccccagtcactagttttcaataccgatgtagtgcggtgtgcatcagaacaatacactgaaacctagaaacctctcctggagcattttgtggtggtgttttgttgcaagcatggagaaccgccatggaagtctttcgcaagcctctctgctctattacttgattcactttccaatcacctctgctcttttccactgcttacttatgatagtaccaccacatattaaacactctctgttgtttttttggcttctaccttcccaccccaggctggaaagcatcaggataggtggattttcagaagtgtggtgaaagccctattagcaacactgcagctatataaggtactttgcaatttacaaagcacgttcacgtgatcctgtctgaccctccaaacaacctatggcagaggtggggaatgtattatgatgtttgtctcagaatcaagactacatttgctgatctcctctgatgcatcaaggactgtacgggggctactttatactcaggccttctgctgacctatatggagactttgtaaaattagaaaaagtgccctgtagaggatgccccttcctctagagtgaatcagccccacaccagggcaggcctcaggctagatttcaaccctaaggtcccctcagcaccttgcatggagctgtgtagttattaatctatttacttctcattacagatctatactctgggcaatactccctttctacagatgagaaaactgaggctcaggaaagctaaatgtcttaggaagagtaacaaagtttcttggtcttggagctgtacttaaaccccagctcttctgagttccttttttttttattattattattataccttaagttctagggtacatgtgcacaatgtgcaggtttgttacatatgtatacatgtgccatgttggtgtgctgcacccattaactggtcatttacattaggtatgtctcctaatgctatccctcaaggatctagaatcattcttctgagttctaagccagtggtggtttcaccaggacattctgccctcggcccacagcagaagcctctgcacctccttcccagccctcccagagcagtgctgggataatctcctcctccacaaggctctgggcatttgttattttgcctatggagggagtagcctctttggaaaggaatgcctctttcaggggtgcttctcagacttgatagatcagcgtcccctagagatcttgccagagggtctggggtgggccctgagcatctgcctttctgataaggtcccaggccatgtggctcctgctagtccattggccacactttgactcgcagacctttaatacagcagaaaccagtcactgagttccaccttttcccgttgccctgaagacatgatgaaaagataaacaaacgtttattgggtatctactatgcactaggcttagttcattctagcaggtaaaacaggaggaaatagccacgctcagtgaaatttaataattactacatcacacatagcccttgcaaggaaaaatcagcaacatgttaagaaaaatgaaagggattgaattgactcaataggcaatgctgtgacacagggaagcacgaggccttgggggtcccatgggcaggcgcctcagccagcctcgggatgatgggcttcctaaaggaggcaattaataatgaggatggtgatagcatcaagaattatggttactctctgtggaataactgtctggagtgtctggagtgtcagacgctatgccacacggtttatgtactttatttaattttacaattgtcctataacacaggggtgtccaaccttttggcttccctggcccacattggaagaagaagaattgtcttgggctacacataaaatatacaaatactaatgatacctgatgagtgaaaaaaaaaaaacgaaagaaaagaaaaagatccgtgcataaatcccgtcatgttttaagaaagtttaccattttgtgtcgggccacattcaaagctgtcctgggtcgcatgcaggccgccggttggacaaccttgccataacacattatttcacagattggaaaactgaacatcaaagagattaagcaatttgctgaagccaacagaactgaatcagtgcatgattttatagtttatcttatactttttagaccaacaaatgttggtaatgattttgtgcctctttgcctgatgagaacttgcagcaccaggtgtcatttccatccaggtagatcagagtgatctgggagtttgtttacaaagcagattcctgggcaccactgtggacttattgaatctgaactctgaaggtgaggcccgggaatctgcctctcccaagcttccctaatgaggctgatggaaacactactttaagaagttagctgctgggagcagtggctcacacctgtaatcccagcactttgggaggccaaggcaggtggatcacgaggtcaggagtttgagaccagcttggccagcatggtgaaaccccatctctactaaaaatacaaaaaattagctgggcttggtggcgtgcacctataatcccagctacttgggaggctaaagcagaattgcttgaacctgggaggtggaggttgcagtgagccaagatcacaccactgcactccagcctgggcgacaaagtgagagtccatctcaaaaaaaaaaaaaaaaaaaaaaaaaaaaacattggcatcttgaaaagtggatgccatgcagtagaagcctgatctacccaattccctttgtcatcctcactataaaaatgtaatcgcctcactaaacagaaatgggtactagatatatatttcttggtttgtttagtaaatttacagagtgcacatagggtaaataaaaaatcagcaagaaggcagaagaacctgaatgctttgaatcaactatgtaggaaaagctaattgtttgatgaagtacttattgcttgacacaaaattttgaagaaaggctctttatgcaaacttgtctaaaacatccttaaagtttagacaagatatagatagaaatagaataaaagattttatttctatagatagaaataaaatagaaaaattcacccacaaggatataagacatcttatcatttacaaaaggctcaatgacaaatgatttttataaaactcaattggaagtgccattagacaaattggtttaagaagtatcctttaattgcacattctaatgtggacaagataatcattaggtgaatagattttaggcaaattagcttttaataaattggtttagggaaaattgctcttttactttttacatgttgggagcatagaaatagaatctggaaattatcccaatgaccccccaggatggacattggtccagatgctggatggaactgatgcatcctggccttgagtgctgcagtatccctgcctcaggcagcaccatacaccaagcgatttagcaccctgagccagtgattctcagctccttgtatatgctgagcatttgggaagaatcttttttttttgagatggagtctcactctgtcacccagactggagtgtagtggcacaatctcggctcactgcaacctccacctcctgggttcaagcgattctcctgcctcagcctcccgagtagctgggattgcaggcacgtgccaccacgcccagctaatttttgtatttttagtagagacggggtcaaagtgctgggattacaggcacgtgccaccacacccggccaggaagcatcttaaatccaaatgtctggcccaaagattctggttcagcaggtccaaagtaaagcccaggaacatgaagttgcatcaggcaactattgcaggtgttccaaggactctgctctaagaaatagtgcccttttgttcagagaaaaggacaaaagtaagaggccaagagttatttttgactgtggctttttacaaatgcaatgctgggccaggtggccagcactgggtggccacccactttgggaggccggggtgggtggatcacctgaggtcaggagtttgagaccagcctggccaacatggtgaaaccccatctctactaaaaatgaaaaaaaaaaaaattagccaggcatcatggcggacacctgtagtcccagctactcggaggctgaggcaggaaaatcacttgaacaacccgggagcgggaggttgcagtgagctgaggttacaccattgcactcttgcctgggcaacaagagcgaaactctgtctcaaaaaaaaaaaaaaagaaaaaaattaaaaaaagaaagaaatataatgctggaacccaacctagaatccctgagaagaggaatgagcatcattgtgattctgatgcacccccagtcctggtcctgaggaccacagggcagtgagcacgttccatcattgcccagcctcagagtcctgctgcagcacatgtaggaggagccatccaggaactagctgggaagacagggctgacccaaatggagccagcagtaaccagcacaaaacagagccaaattcactggcgctgctgaccaccagggttgtaggagttaagggaggaaaggctgccagaggaaagcgggtcttcatttgccgcttgaggggcaaatgcaatttttattatcaaggaacaggaaggcatttcaggaggtgagtacagcaaaggccctgaagagagaaggagcgtggttatcgggaaatccagaggccagagtggacgagagagatgtaagtgggagactcatagtagagtccagacagagtcatacttggacttgcagcatggactgagcatggagccatcatggacctcacgcatgcccagcaggtgctgtagggagatagatatctggtacagagtggggacagatcagagggctgggaccgcattatccacacgataagaggagatgagtgtctagactggtgtagtggtcaagaagccagagaatacagaagtctgagtgggaaaagggagattaaaagcttagatggaagttcagaatgacagataatatgcagctggttccaaatcgtgcctctagttatgttatggggaatgacttggtgttaagatgttgtaaaaatatacaaataggcattgccactctaacaaagacatgagctgcccagcctctcctcagttatccacaattttagggaaagatagagactgcatggctaattcacagaaagcaagtaattctacctgattttagcccttttcttacttttgttcatttttatgaaatccactgagccaaaaatgattttaaatgatttgcttttattcgctgccctttaattcatagctatgtgcatcacaatgaccagaaaggagatgcagcaggaaagaaggaggggggttccccaaggccccagcatgcctttcctggaacagtaagaacaaccgtctccactaacttggtccagctggccttttcttccttgcctgtttccatagaattgctggggctcacttggccaattttctagtgatgaaaccaagtaggttttgctatggaagaagtcacaagaagtggtggaatgttacgagaagctattgattaacaagatgggcagaactcaatataatcactgctccttcctaggcagagaattccactctgccctcctggttctttctcctgaccaagcaaatgagcacctacttgccttagagaatcagagtcttcaaatgaaggactatgggttaagggtcctggagcaaaatccttaacacctcaggacatactgcatttgctaggtttgcactgaagcttttttttttttttttttgagacagagtttcactcgcccaggctatagtgcaatggtgcaatctcagctcactgcaaagtccacctcttgggtttaagtgattctcctgcctcagcctcccaagtagctgggattacaggcacctgccaccacacccagctaattttgtatttttagtagagacggggtttcaccatgttggtcaggctggtcttgaactcctgacctcaagtaatccacctgcctcggcctcgaaaagtgctgggattacaggcgtgggccaccgcgcccgcctgcactgaagcttctaagagctatgtaagtggacccttcagtaagatgagctggacaatggtgttgagtttttccgtgtctcagcactttggaactagctagcctgcctgttaagttcctgaatgtggtgaccttgcaccatgtgcatgaggggtcacaatgaacaggacaagccctcaggaatgaacatgcggaagcctgtggttatgactggtttgcattctggtgttggggagcaatcttatcaggccccctgaaatgattagaattttctgtgtctcagcggtaggatcagaagtttagtgtccatatgccacaactgcgtgatcctaaaattgtaatctgtttcaggctcacatctccctcctagagtatctatttctggggaaggtgtgaattcatcccacagcagatcatcataactttggctcattctgtaaacatgatttgcatctcttgtgatgtgagctggtcactgaacaagatgctgaggtttgaggtacaataataaattacacactgtcactcttctccgggagaggagacagttatgtaaacaggaagtgcagcatagtgtcttcagagaccctgtttcatcatctgtaaacatgagataataatggcatctacctcagacttgttgtaaggattaaaccggttagaatacaaagagcccttagaacagtatctggcacatagtaagcatgatagaagtcttgattatcatgactgtcgtcattcctgctatcatcattaacacgattaacacggacataatatgcatccacgttcccactctctttccacagagtgggaagagggatgtaatgatcaaggaaggcttttcaggggtgattgtttgtgaggtggatcttgaagggcgactagtaattgaccaagaagacaaaacagaggagaatattctaaactgagggaaagtgacatgcaaaagcctagggttatgggaacatcaggcagtttaggaaactcagcagttcaggagtgagggtggatggtctgggtaatggtgagaaaagtgggctggaactaaatgggaggtggggaagccgtgagtgctcctcttcagttcctcactgggatagggagaggcatctgtggaaggtgaggatcctggaggaggctggggaagactgcagcagctcttgggagaatggccaaggccacctggtcaactttgttgagcatggagaccctgaatccatgggccaccaaataagtagaatccacaggagaagtgatctgggccataggagagattctgctccagcttttcaggtgccataggtaaggttatttccaactgggggaaccagagcagactttatagaggtacaatgtggacatgaagagatgaaccaagcaggagccagcccatggaaggccttgaatgatgtatcaggaaggtttagtccatggatgggttttaaactggggagctacgtaatcagatttgtgctctaggaatgtcattttggcaggactgtaagttagactggaggaaggccacgttcaaggcagatagatcattagagaagaatctatggcctccgagatggagagtcagaactgcgtggtgctccccaacacggggtgccagtggggcattgagactccctactcctccctgctgtgctgttccagaccatgcttctcccaggcaagcctacaacccacagggttcaaccaggttcccctccagaaatgtggggtatggcagcaggctacatcttcccagaaatgccctggggtctagtctgaccctgagcccctcaaatgtggagcatctctaggaagctcaatggcattgtcatggaacccagcagttggtcctaggtaggttccagcagcctggaatcccctgtgggagcctccttactgtttcagtagcccacacttgagtgggcccaccagtccagcagtcactctcactcctgccccactcgtgcacccaagccaggatctgcaaaaactaatcttcacaaagcatcctctcaaagcaggatggtcgtccctaggtgatggaagagggaattaaggttggcagcagtaaaggcacttgcagagtggcatgctgttggtggacttgaccctagggctggctttaaatcccatgcctgttgggaagttccagctttgaaaggatctgttcacatcataatggcaaaattgtagacatatattgtagactagcatgtcttggtctgttttgtgttgctgtaacaatacctgaggccaggtaatttgtgaagaaaagagatttctttagctcacagttctgcagactgggaagtatgagaaacatggtgcttctggtgagggcctctggctgcttccacctatggaggaaagcagaaggggagctggtgtgtgcagagagcacatggcaagagaggaagcaaaggagagaaactgaggaacccagactcttcttaacaacccactcttccttgggaactagtccgttcctgggagagctcgaactcgctcacacccaccactaatctattcatgagggatccacacccgtgacccaaatgcctcccactaggccccacctgttaaaggttccacctcccgacatccttacattgacaattatatttcaccatgagtttttgcagggacaaactgcatccaaaccatagtttggcgtatcctagcaaaggtttccttgacagtccatgggtgtccatgagcagaagagctcatcacatgcctccttcctcctgcctcactatctgggccgctcccaagtctctgacatactgtgcattagacaccactaatgtctgggttcctgaaggcccttatggccagtgcaagtgcacttggagtaggaaacaagagtcaatggatacttgctgagtagcactcatcacgctggtgcctccaactgacgcattttacctaagaggctcaactcattggccacagtctccaggtgagcgcatctggtgttctgagtttcttctgatgcccccaaactcacatctgcctctcgccctctttctgccacagatcctggcgcccctgtgaaattgccttgtctgccagtgaaactgtcgcctccgctacctccaaagaaagtcatgatctgtatgcccgtgggggggccagacctctcactggtgtcctacacagcccagaagagtggccagcagggtgtggcccagcaccaccacactgtcctgccctcccagatccagcaccagctgcagtacggcagccacggccagcacctcccctccaccaccggctccctccccatgcacccctcgggctgcagaatgatagacgagctcaacaaaacgctggccatgaccatgcagaggctggaaaggtaaaggtgggcaccaggagggaggacgggaggagaggggttggctggggaggggggcctagggatttggaccatgacttaggaatgtgaacaaggggtcatccccactgggggaaaatgtttgaaagtaaaatgagacaaaaaactgaaggtcaaagcatggaaaaaaaaaatgttgccaattgaaaagctctggaataatcacatttatcggaaagaaaaactaacattcatgtatatatgtatatgcttatatatacacacagtcctcagtgtcattagtaggttcgtgaaaattgcaacttcagtaaaataaaatctaacaaaaccaacttaaccatagactaattgatataaacaagacttaagttcctatagcatatttctggtcacaaaaatatcaccaaacttctaaataaagaccacaacacttctaatattaaacattgaaataaatgtgagctgtacatacatttaagaaaggttaataaaaacaaagaagatgattacccaattattccagttccgggtggtggctagccagagcatgtcctagcagcccaaggcacaaggcaagatctggccctggtcagacatcatcccctcacagggcacacttacacccacacccacacccacactcactcagacctaggacagtgtagacatgccatttcacctgacatatacatcttagggatgtgagaggaaacctgagtacacggagaaaacccatgcagtcgtggggagaacgtgcagactccacacagacgatggccccagctgggaatcagtttgttttttttttctcatcaatgttatggcaaaatgacattgaatgaaatgaccttattcaaggacctgctgtatatccatctttgcatacgtgtgagtgtacgcacatacacatgtacacacacacacatgcatgcacacatgcacacgcacatgcacgcacatattgtgtctctataagcattaatgttttgtggaaaaatgtatacgtagtcattaatagcatttattcctggtgtggtgaaatggggagaaaatacttttatatttcatatctttctatagtactttttaattctgtgtatattacttttatgatactcaaaagaattaaaatatgaaataagaaaagatgaggactggcaggtgttggagggaaacaagagggctggggaaggtgggaaggtataccctgttcttgctgatggaggaagcagagtcccaggctctgattatgtgcacttgtgaggctaatatttggccactaccaaggcagctccctctttcaccagaatatgcctccagtcgctcttcggggagagctgcaaagatgaccccacaggcaggcctgcagccacgaccctaactcctcaccacatagggagatctctcaaactggttctcaattactcttgattgtgtatacacacatgagtgtatgtgtgtgtgtgtgtgtgtattcaaacaccgccacctacctcacatccaagaaggcactgggatttcccactggggctctgaggcacattgcttgactgagtgccctggtgtaacaaggagaaagtatgattatgaggtgcaaagggtatctctgactgtgagctgaatgcttgtcccatagtagtggctgctggtcattgggtcctacagatggaaaatggcagtatggaggtcccagcgaatcaccagagagctaaaagcgagatgcacaggcgggagcttcgggttgtgttttcctgactctcggtggctttctctgctcctgcctgtcagctgagtattctgcatttgggaaaggagtgattcactgggaggttgctgtgtctaggaattctgacttgattgtttggtgttaacacctgcccttgctgcaaaaggaaaaaaacaaaacttaatttggccccttgctgtcattggcaactattcttgttattaattagaacaataataatttaaaatgtggctggcacgttttaatctattacacatacacattgtcatcactgtcattgtcatcttatttaatcctcacatcatctacggaaacggagtagatggagaaactaagggaggttcactaagttccccaaagccaccttctcaaagggtggcccacaaatggcttatctcacatctgcaaccacgtaagtgcagacattgagaacaagttttagatactcttacagcaatatgacagaataatttcatgtctgttgaatcttgtcattaaaaagggcttcattatttttacatttgtattatattttacaaaagcatcagtttgtgatggatcgaaaatggaaagaactaaacagtaagaactgtttcttccctgtagatgtttggaaaacactaccctaggtagtaagttgagaggctaagcctccagcctgggtcttccctctccaagtccagagatctttgtactaacacacagctgcttcctaaggacatgtagcagccaacgtcattgctgcccacccccccaaccccatgtctacatgcacccactaagttttcatatctctcatgagcgtcaatcatcagaaaagatacttggatagcatgttaatagtatattgctaaatatgcttccacttaaaaaaaacaccatattaaaaggttcaattaaagatgctaactgacaagttttataatatctgtgggtatttgcgggatatttcagtttaatttagaccaatgggtagatctagtcggataagggaattttggtgggggcagggtatgcagcatgatctcggcagcagagccaaggcagtctctgcgctttgtcccaactcagagtcatttcctccttctttctccctcacttcccactcgaggtcaaagcatagggttgtcctaacagaccaaccaggctgcagagattaatgcatgcatcagtttgacaagattgccaccccagagaaagagaggccctcttcccaaacaaagaccatcccagaggccctcttcccaaacaaagattggagagatttttctgtgtgtctccagtcatctccaggaagaatctcaaaataggccaaggtcacaggccacacttttcagtgtagggagggaatcaccagctgtcttgggtgatttccccctgatttttactgcctaaaaattctccctgttgcctgtcaacatgatttcattcttgttctaaccaagttttatacagaaagaaagaatcatttctctatcctcctggcaatttccagtgaccccaaaaaactctgcaagaagggagaggcattaccaaacactcaggcatcctgcctttaaagttccttggaccgaccccctgtttgggccattgctgccccctgaaatctcaaagaatgtcacaccataggccatcggtccagatggacagtctgatcctgatgaaaaagttataggtaatatacaaagttgaatggtgaattaaacagcatcaatgcctgacactggaccatacatttgcacaagtcatcttatcaatgaaaggggccttgaagaccatccaggccaccaagcccctgctcacagcagtgttcctgaccatttatcctctggtctctgctccaacaggacgttccccaggtcccaacatagcctgcttcattgtcaagaaggtctgactgttagaaagttccctctctattaaaagttttacttactgaaatttgtatctgccccttcccgatcttatttctaatcttcctttcctgtaaaaggcttttaaatctttgaagatagctaccattcccttcatttaaggacttctctagatcttataccatcttgttcgtgttcccctgagattataccaaatctgctctgatttatatggagaagttactttttatttatattttttatttttgagacagcatctcactctggcacccaggctgtagtgcagtggcatgatcatgtctctctgcggtctcgaccttccaggctcaagcaattctcccacctcagcctcctgagtagctgggatcacgggtgcacgccaccatgcccagttaatttttttttattatagtttttgtagagatggggttttgccatgttgcccaaactggcatcgaactcatagtctaaagtgatcatcctgcctcagcctcccaaatttctggcattacaggtgtaagccatggcacacacctgcagagaagttcttagacactaccttgcctaagcctgcttgatggcactaaacaatggcgtggttatttacagctttggctcacaagatttgggggaaggagctagaatccacttgaagcaaatttaaagggtcatatttattcaaaatcacagggttgccctaggcagtggggtccgagctggtggcatcacacacccctacttcaggacaaagtgtgtgggttccagaattaactgccggagtttgagtcttagacacaccacgtattagctgtgtgacccaaagcgtatggctcaacctctttttgattttcatgccttatctgtaaaataaaaataatcataatgccagcagcctcattagggtcatttgtaaggatcagattatttaatgaatccaaatcagtggggttattgcatgtcacacagtaagcaaatggtattgaacattagccagcatggaaaatttgtcttcagtgaccctagaatggtttgggtaagtctgtttgtttgggtaagtttcctcaaattagattatcttcattcccctcaccctggtgagccacatcttttggaagatgatggtttatcatttcttttttttttttttttttttttgcattgagatttcccctcaactttccattctaataaataacactgcattttttccccatttttgtacttaaatctttgctagcctttactcttgttcttaagaaacaagcttttcttaaagtcattaaagagttgaattcatgattatttagtgaccctgttgtggaacaactttttatttgtttatttttatttttatttcaatcgtttttgggaaacaggtggtttttggttacatggataagttctttagtggtgatttctgaggtttgggtgcacccatcacccgagcagtgtacactgtacccagtgtgtagtcttttatccctcaccagcctcccacccctccccctgagtccccaaagtccattatatcatttttatgcctttgttatcatttcaaagatgatgcagtgtttttatttttaatatctgcagtaagctccgtgatctagttggcatcaatcctagaagtcagatgtaaagtcctaatcaggacgccgtttctttctgatcttaattcggctgatctctgtgttccagtctcctattagtaaaatgaaggtggaatgtggatccatgtggaccctgaaggaattttaggaagattcttaatggaatgcactttaaagaagtctttcccttctcaattaaaggcaacttcacactttcagtcgctcatgccaaagacctggagtcacccttgaccccttcctttctctggttccccacatctgactgtccgcaaatcctgtctggtccacactgtacatacacagggataagaccaacacttctacatgctccttcttctcctgcctgagcctcagtcggccttgcctggcttactgcagtttctcccacctgttcttctgtgtccacacctgctctgcagcccatccccactacaacagcaaaagagacagggtttgaggaaagtcagatcgtgactgtctttgtctgcaaggactgccatttaaaaacacacacacacacacaatgcgtgacttagatgacagaaatttattgtctttcagttctggacgctagaagtccgagatcaaggtgccaacagggttggtttctcctggggactctcttcttggcttgtaggtggtgtcttctctctgtgtcctcacgtggtcttccctctgtgtgtggttgttcctcatctctgcttataaggacaccagtgatagtggattagggcccacaccactgacatcattgtaactccctcacctctttaaagaccctacttccaaatacagtcacattctgaggcactgggacttaggacttcaacatatgaatttatctggggacactgctcagctcttaacaatgtctgtgcccaaaatgcttctgtcgctgtccaactcactaagagtaaaaagcaaaatcctccccatggcccagaagcccacacccactccaagttcttttgcaaagaaaaatctacttactcttcaagacattattaaaataccaggtcctctgtgaccccttctcagattctggtacagatctctgccctcctgcacacaccccttttgcatacttgcatcaggttatgtgtttctctctatattctgtctttaatgtggacaggaaccatccttgtctcctcatctgctatggtttgagcgtctcttctccaaaattcagggttgaaacctgagtattaacggactgcccctgtggtctccctcgcttcatcagctcccctctctgttgctccctcctccctcacacagcggccttcccaccattctcgcacattctcggacattctcggacgtgccggacacctcctgacggggccttggcactggctgttcccctggacggactgcccttccctcaaatatcctcagggctcctacactcacctgcctcgggtctctactcaaatgtcacatcctcaatgaggcccttcccgttcaatattgcaaccctcctcgcaacacagcctgttccccagctccttttattcctatcaaagcatttttcaccatctaacgttttgtgtcatttgcctttcattcggtttgttgctcttctcacctaatagaacatacagtccacaagggcaggaactgttttgttcatggctgtatccagagtgcctacaacagggcctggcttataggtttgagtgagtgagtgagtgagtgagtgagtgaaagaataactgaatgaatggagagcctctcatagctgcagtgatattctttcacttattaatctgcttcctattgatggattgagttctcacaaggcatatgttatataaatattaagcagtattagtggtctttaaccttttatattttctttattctaacaatttgaactgttccctctgtttggaatgcactctcttacatcctgtcctctaccacccagagcagcttctttcacaaagaaaaattcttgttcttcaagacattaaaataccaggtcctctgtgatcccttctcagattcccatacagagctctgccctcctgcacacaccccttttgcatacttgcaacaggttatgtgtttctctgtatattctctctttaatgtggatgggaaccatccttgtctccccatttgctatggtttgagtgtctctcctccaaaattcaggagttgaaacttaatggccaatgtcttagtattaacaagtggggctttgaaaaggtgattaggccatgagggctcctccctcatgaacgacattaagacccttgtgaactggacttcacacagcagcataaagccctcttggccttccaccatgtgagcgtgccgcgtttctcccagccagaggctgcagccctcaccagacagccaaacctgccagcgccttgatcttggactttccagccccgacaactgtgaggaaatacatttctgttcttcttaaattacccagtcttgggtattttattatagcagcacaaatgggccacaatctgccatagtacctgtcatgtaggaagtattctgaaactatttatggagtgggtttcattaaaagttactctaatctttgaaatagaaaaatatcttacttttatgatcaatgttttgttacaaactgtctcaattatagaaacaggcttttgcatacttacctggcagtggagataccatgatcacgaaggtggttttcccagggcgaggcttatccatcgcactccggatatgctgacccctgcgattttcccaaatgtgggaaactcgactgcataatttgtggtagtgggggactgtgcttgcgctttcccctgaaaaaaaaaaaagcaagaaaagaaacaggcttttgctgaggatccactcctgcttcccctgttgggccattcctgttgtgttgtgtttgatgttagaaacaacgtacaaagttcctcccttaaaattaaatctagatctttacttgtcatgcctgataatatcaaactagagctccagatactataattttgattatgaactttagccatcattgaagtacatcgtcccttcttattaattctcttggagcaaatccttcatgaatgataaaatgggagaggggtcatcatccttagctaaggtagggatgctaagatcgctaaggtgtagggaatcgtatttgatagttcagctctatccagtgtccttagactaaacctgaaagttaacttccagaattttacgctgagacctgaaaaataggagcaatcatgtaaggaggagaaaggcaatgcgggtacattctagacggattagaggaaggagtgtgttggtagaccaggtgagttcacatgggaagaataattgaaatctctgagtttgatctaaaaaggctaaatatgaatgagtttttgttactagtatcattcatgcatgctatcaactgatgcaaaatatcaatagatatttttaatgatgccttctttacacccagtgagttttagtttaggaaaattttaagtaccatacatttagttctgatggaaattgccacctatgggccttaaaaatgaaaaaataaatacgtttctaataaattcattctttatctacctcttcctgtcccaaagtccctgagcagctaaatgaagaaagcactgacatttgccaggaaaaaatttcaggcaattactgacttgtaaaccttgaatgaaaacaggccctgcaaaaagaaaggatggtacctgtgtttgcttagcaaatggaagatccaccaattctttgctgagtacattttctagaccaggctccgtgcttggcactggggatgtaacagtgaacaaaatacagaagataaccctcagtgcaggttagaacctgctgggagtatagactggacagatcagtacccatgagagtgcagggagggagaagaatgtgcaacaggaatgtcaactggtctatgaaattcggagttgtcttctctgaagaactgcatttaaactaaaagctaaaagagaggaataaccagatggagaggagaatgggaatgagagaacatttaggcagattagaggaaggggtgatatactgtctccagatagagaatgaggtttttgataagaaaagggagttggcatttgttttccaggtttttagaagacatagcatagagaatgagattgatgacgtaacattgtaatcagatataaggaagaacccaagagccaacagagaggacactgaatattttttaagaaaaatcaggctaataggagtcccaaatggtttactcatgtacttatgtaaagaaaaaccatacaggtcggatcagctgctaaggacatatccaactctaactgcagattagatatattgaagtaggttaactgtaatgtgaaattttggagaagtagaatggctttacctctgctggcatagtcaatgtacatctgtgttaacatggataagccagtccaatctggatgatcaactagatgcaggaaagttccagagtcgtcttgaactcttagcaacacccattgatcactgcatgccaagcattgtgataggcacagagtaacaaagcaatctttcctttaaaattataactgataagtttatacgaatagtttattatttcttataatgtcccctttttacatttacatattagctagagatgaatttgtcaagaatattgaaaaaggaatcatttttacattggacagaagaaattgaaatcagtagaccctcaaatccctccaagctctagaattctattatcccatgattatttttaggcctttcaaagagcacaatacaatttataatccttgggtaaatacatttcatggttacaattacttttcttcatgttgcctcaagggtcacaggaaattctaaagaataattcttcctcctaaactagatgatccctagggtttcttttagccttaacagtctaaataattattgtattggcttatgtctgtaatgtttcacctgctaattagggtgttccctgacaatacacagatatgaatcagtgcctcagcaagaatgaaactctgaacacctaggtgttgtttgcttgtgaagtggtgttgctttgtagttccgtgtttcttcatgacataacaaatggcctacattgttaaatgaaatatgtttccagggaaagattctcttcttatggtgatgatcatctcttcaaaatctcacacaattccagctagacatttgtccttgccccttggaagccagcactgtcaatctcttactttaggtcagttctttgattttaaagcctatatttatcatctttaattgcctacacgtacatgttgtttttcagatttaactgctattccaaggtacatgatgtggttttagtgcaaagtaatgtcattatgagcaagacccatctttccctataaggttggcaaggaaattgtctaagcaatttcctaagttgcttaactttaaggaagttaaaatgaaactgtacaaaccattaacacctttttaagacttaagaggattaaaaaaaggaagtgtattttcaaaagaaagggaatctgcttttgattttttttgcttcaatagaaatactgcccttttccaatgcacaaatattgactctttgatcttcttggaaaccatcgtccagaaagttttgcagatcaaaaatattaaaacactaaaggaaatattttaataaattagtgggtaatatctataatgactaatttatgataaattgttggtgttgacatgtactcctagttaaaacggcaactctcagcattgttgtccaggaagcacactgcaccagcattgtcttctaatttcgcagctgcctgggaggtgggcacctaggtttctccatttaactgatgaagagccaaacaccaagagacaaggttagcaatggcccagctgggactcgcaccattctgctgactctctgtcctgcctttttagtacccatgctcagccaagcatgctagaacactcaccagcgtctagggacaaagtcaagtagaaaagccaccactggtttctccatcagaaatagagagtgctgggagggatgggctcttggtcagactctgtgtgtcttatggttttgttcatcacatcccaatcccagataatatttcagaaatgtgggtcattggtccctgaaaggacagaggctgtgaacaaattaatttaaatccattaccactgctgaaaaaaaaaactcaaaatacattttctattcaggaaggctcagtaccctcgtctatatatagaacagcatagtttcctgctgactaaagttcaacaaaaaacaaaagctttaatgttacatgtcttatcttagaaggctaatcctaggccatgataaaccacacaatgtatgcctgctttcttaaaaagaagctgattaactattttcttaggctacattggttatttctgctatttttcagcctcaggcactgcaatttgcagcataatttctcacacatttttggtctccaagaggaaagtggctgattattctctctcccctctgaaaactctcttcataacttgtgcagactaaattacaaaagctgttcctgttgaagtttaatttggctttcagtgtcatatttgtagataataaattttctctgtcctttgaggagattaatgtctttcttttttttaacagtggatgcatttaaaatcagatatcagaaagcaatattccctttattacatgtttttctttagaaatgatggtgaaatggatcccacctattttagagaaagattaaggatttaaaagagacagtgattttcaattttatgacctgcccttgattccctacaagagtttcaaaggtgtttgccggccagtaattcccctcccatggatgggtcacagtgatttcctactcatcagcctgtaccgtggaatggagataaagtgatgattacaaagcccccttgaaaagggagtgcctcttataatgacccagactcactgtagatgtcttggcattcattcctgtatgaaagactgaaagtaaagtctgggccttacccttatccagtaatgaacatgaaagataagtcagtgtcttcatttttgaagtctagagatcccttaaaaatattcggccattgaaatggtgggaaaaggccaggcacggtggctcactcctgtaatcctaacaactttgggagcccaggagtttgagaccagtctggccaacatagcgagaccccatctctacaaaaaaaatcaaaaaattagccaggtatggtgacacctgttagtacaagctactcaggaggctgaggtgggaggattgcttgagcccaaaggtccaaggttgcaatgagctatttaaaaagaagaagaagaagaaggaggaggagaagaagaagaaggaggaggaggaggagaaaaagaggaggaggaggaggaggaaagagaagagaagagaagagaagagaagagaagagaagagaagagaagagaagagaagagaaaaggtagaaaaagggaaaggaggcagaaatggttatctacccgggctctcaacctatgcatctcctacttagtttaacagagttaaagagaagagtcgagttttccaaaaagaaggcttggtaaaggtcattcttggtgggaacaagaccaagggaatagagtacagcttttcacctccctaaggcatcctgtagatgtgatgagaggaaggcagttttaaatgtgtgccttttattgactcgggactgccattttcctctcaagctttccaaatatgtctcttttcagtgtttcttgtgtaaatagcaaggcttctgttttagggatacttctgttcattattttctgttcatttaagctgttccatcctctaggggaaaatgaggatgaaacaaagtcctcatccttgtgagcttactcgttagtgggagcgacaggtaataagcctgtgaatgtgtaatgtgatgtcgggcagggacggggcactgaagaaccatcatgcagggtcatgggaggagcgtggtggtgatgcctctctatcctcaaggagacgtgttattaaagtggccacaacagatacaaaacccactgcacgacccctttttatcagcagcgctccgttgtgcaaggctggattatccagcctggtaattattctgtccttcctcttgtcgcctattctctccgcacacctactcacccccagccatgtgctactcacacaaaacttgtatccccaagtctagaattcaaaccccctccctgtgtgttccataatagcgctcatcatgggactcttcacagcaaaattcatagcaagagagtagctggattgtgtgaacatctgttatccttgctttttgttataaaaatattatagtccacggtttttaaaatttgcggtataaattgcatttcatagtcagcatatacatctacagaaaaaatgatgggctttgctgattctccaggagaaagcaacatggttcatggaaagaacacaggccctgggtgggaagacctgagttcacatcctgctgtgatcactgccgagtgatcactgtgttctcagaaacctcatgtccccattcataaacaatcaagataataacaatacccttcttaactctgcaagtttttgtggtgattaaatgagatgatgaacatttacaacacgctttcatagggcactaaaggaccatctgcggtagccatgtggtggttttgaaagatgctcctgctccttcatcctgagctgtggaacccgctggtatctttaagacattgtgtggaaatattccgaaatggtgcatctatctgtccaacatcttgtgaatatcatggaatgctgttcagtttctgcatgttcatccctattacatttgtcaagaaaatgacattatttggtgctacctaggtgatagggagcagaaattcatctgtttttcccttggaaaataatttaaggcctttggtctttgtttaaattcattatagaatgttagtataagaggaaaccatatagatctcatcaagcttaatgacgtcaccttacaaagcagcctaactttggacagtctgaattaaagtgggctgacggcctgtgagtatagaattggaaactggaatatcataagctctctctgttacctcttctgtgcagacacagtcctggaatgaaggccacacggtaccaatgtgctcttgcttgcatagatctctgtgccttagctccttgagttgtcttcttaggaaaaagacctctagagcactatttccaaaaatcctaatgctcctttcacaaagataatttccctacaacagcaagactctatctaagggtcagggatcctaattttagcaaattaagtaattgaaaatgtaatgtggtgtattctgattgtgtgtgacttcaattcaaatatttgatcaacttatccatcagttccaaacacatgtgcaatgtagaggtagaggcaggaagatcatcagcctctgtcttggagaggctcacagttaattggcgtggggggtaaatgcttagcctgtaattataacataatgtggcagatgctataacaaagctgggaacagaggctatggatgtgcagagaagggactgatttccattggaaaaatcagaaaaggatgctcaaatgaaatgagatttgagtcatccctgaaagataggcaggatgctctctctaggccaaaatctgaagggtgagttctggggcggagcaactgcaggagcagagggaggaggcagggaagtccacagggtacttgggcaatggcaagtggtctgatatggctggaaccctaggaagatggtaaggaataataacaaatgagattgaaaggagttggagggtcagatcgtgaggcacctcttaatccatgctgtagagggtggagttgatccagtttacaatgaggcctttcctggctcttttgattaggagaattacatgatcagaccagtttgacagcagaatagagggtggactgggtgggtggggagggggagggtctggaagaagattaaagtttgcaaccattgggggaccactacttctacataggcagtggtatagtgacatcagtagatcaggtcctgtagtctgatggcctgaattcagtgtctgcacccctctggttgtgtgaccttggccacgtgcctttgcattttcccatctaaaacgggaagatcacaatagtacctatctcttaggatccttgtgaggcttaagtgaatcaacacgtgggacagtgtgagcatttagaaatgttaacttccatcatcatctgtaataatccagttagaatgaacaaaggtggccgggcacggtggctcacgcctctaatcccagcactttgggaggccaaggcaggtggatcacaaggttgggaattcaagaccagcctggccaagatggtgaaaccctgcctctactaaaaatataataattagccaggtgtggtggtgggcacctgtaatcccagccacctgggaggctgaggcagagaattgcttgaatccaggaggcggaggttgcagtgagccgagatcacgccactgcactccagcctgggtgacagagtgagactccatctcaaaaaaaaaaaaagaatgaacaaagactccatctcggaggttaggatgagattcctcatgtttacctgcggttttagaagctagttagcccttaggaagagggagggtgaacacaacccatgtgcaatgaagtccatttgaatttgaagccaactaaatgcttaatgccaaagaatgttgatgtgagtgatctagaatagattttattacacgagtcagcagttcctgttgataggtactctggaagatgtgactctctcagaccactgagtgtcattcagtaaatcactgatctgggcaaagaatgagaaaacctgtttcactcaagcgtcagcctggagctcttgcattcatggggtaactaacagctcaggaactgaaggcaggagtgcaagtaactgagtaagtagaaccccacgagcatcagcatcttgttgcagcccccagaatgccagcctcacacctgataagtcaggaactcacatgagaggatctggacagttcttcatcattcagcgaatgctgcagattcctgataattaatacctaagtggcttttgaagagactcacatggtacagtgctgagaatgcagcaagcagcaaagccactgtggatgctctaggccagtggctcctaatctgggatgatttttgtccccctgtcccccagaggacatttggcaatgtctgaagattgttttggctgtcacagttggaggaagtgctgctggcatctggtgggcagaggccaggggtactgctaagtgtactacaatgcacaggacaaccctcaaagcaatgaattatctggcccaaaatgtcagtcatgcctgtgtcgaaaaagcctggtctagagcaacatttaaccaaactgtgatatctgcatcattggtggtacagaaaatgagtttaggacaaccttttattagttttaatattttattgaatattgtatgtacttatgcatatatcaatattgaaaatatatgtattacaaatataaaaatatatcttaacatgttataaacctatatgatttacatacaaaacctgttattacaaagatatcatttgcttaggatgaggttacaatagtgtttaaatttttaaaaaataccgtactgacttaaaaaattacaaagtaaataatagtgtaaatggacttcaaagatgccatacacaaaaaagattaaggaggtgggagtataatcaaggtttagaaaacactggttcagatcagggcacagaaaattttttctttaaggaaccagatagatagtaaatattttcagctctattgcaactactccactcttctattttggtgcaaaagcagccaaggtgaatcggtgaatagatgggtctcctgaacgccctgagtattaaactcagtgccccaggagtggcctggtcatggcagggtagaatactattacctaccctagttagtaggacttaaaatagttataaataatgatgcccattttttacacacgttgttgacaaggtatgatatttcctccatcttgcctgggtacatttagtcaggtgtgtgttttatcaaaggacacatctcataagtatcacagttcaacttttgcatgcagaatttgtaatacagtaggttcaaatttcaagcccttcctttaccaactgtgtccttgtgggcctattcattaccctttcagagcttcaatttcctgcttcataaaatggggagaacagcacctgtcccatacggttgctggaaaggtgaaatgcaacactgtgtgtgaaaattacacatttagtaaatgttctctctattcactctcccttctttccttctctccttcaactctttcagttattcattgaggatgccctttttgtcattgccattgataaagatgctaaccaagtccagagcaccacatccctgcagcacaccactagatgcctccctgaaaattaaaaaaaaccccttagttaatgccttttgaacatgttttgctgactgcttacaaatatatctaaatgtcagtcattccagcccatatttatttcattcggctaaagcaatagacaattactgagcatctactttgtgtcaggcacgatactaggcactaagcatagtaataggaaccagatacaaacagaagatgtggcttctgcccgacaaggagcctacagccttgggtggtgaagagaagatagtaagcaaacagatgatcatggttttcacccttgaggactctctcccataaacacaggcaaggcactgactgagacaagtattgagagagaaataggaatgaatgaggtgaagatggtttgggaacacattccaggccaagagcattgaatgcatagttgcaggtgatcaaggggtcagttgtttggagacagaagtaaagaagtgggaatgagtctgggttaataatttgggccaaattatgtagggtgtggcaggcacgtgacattatgtttaagctactgtttgcaggctaatggttttcaccttcctttcggaatgagagcctgtatttagagcagatgtaggtaataactatgttataaaaaaaactcgtgctacagtgactgatgttctgctgggtgtctgtcagcagcagggcacaggccacgtgtcataagatgctgcatttgagttgatttggttctttgcctcaaatagtacagttcatgatgcgttaactgaattttcatttgcatcactcctagagcagtagttttgtagacttgagaggcattcaaagttctcatgggtgaggctcttagatccgagttttagaaagccgctccgacagctctggagactggactgaaactgagcctgctgtgaaaccacttggaaggccatgtctgtcaataaccagtgagggtctcatctgaggccgtgtcaacaggcgacttcacatgcaccagccctacaatttggccaatgtcaagaagagagtaagtggcaaaacgtggactcagatctgtctggactccccaaactgaggccacatattaaccttcccagcctccttttcagctaacttctatactctcctttcttttcttgctctcctgtggttctccatagttacaaaaggggtggatttatcggggcatttgtcttcttctcaggactcttcctgatgcatagttggcattcagtggatatttattaatagaatgttttacaattcttttggtggattcacctagcttcatggaaaactacctccttcagtcttaaggaaaattaggcattcaagcacatgctagggttcacacatcaagaagatgacctgattggccccagaagtctttagctgtttctctagtgccccaacaggcagtcattggccacctgaccaatccctatttgacaaacccagtagcatggtacctggtacctttcaaagtagccagctgtcctccatttaatcccatcctatgcaagaaggtctctcgctgcccatgtatctttgaaagagaggaaaccacagcctcttgttgattacacactacctatgtggtggagtttcttatcttcctttgcatttttctctcttctttatcttcttgaatcaacttggagccttctaccttaaggaactcatactctctagtttccaacttttttccttaaaagattcttcccaccaaacaagaatctattgactgctttcatccccagctcccggctgccgttatccccagctctgtgcctttataggaaccattgctaattaaccaaaaagtggagagaggaaaagacaggattcaggcaaaacatgagccatggaattacattttttggcctcttccatccttacttcctataatacccaatgtggaaatccaagcgcagttggaatggagtggctgtcactgataaaagggctgctttgcagggtgggcaccaagtccccagccccactttcatcacccttcgccaccctggaggccatctatcgtgtacttcaccctcctgctcccattgtcatttgtattcaattaggtgggaaatggaccaacgtaaaccactaatgtgataaaccactaataagatgctgcattttgtaaatacgtgatttaatcctattcagtagttggcttttttttaagttgatttagttcattgccttgaacatcatagctcataatgtgttaactagatttttccatttgtgtcactgaagagttctgtgaaaaatacaaggagaaaaacagctctttgcaaacaatggaaggaaggaagttaattgaatttacattaggcatagcaataatttaaagcgtaattgaaagtttcaaaggagaggcatgcattcatatgtcataagtcagatttcttttggataaaatattcaaatgtaggacttactgatatataatataacctcatgctccatttccttaggcatgtcaaacacttttggatggtaaaatgcattgagtttcctgtatttagaaattccttaaatgaaagatataaattccacttccagttaatctgaaaaagaattataaaatttaactatggtttctggcttcatattctatgattcttactagatttcatgcaaagcctgtcataaaaaagggttctaagttactacataatcctcagctagaggattaagaaaataattattttatttttgatgacacgcatgtagtaactttcgaacaacaaacttgtatagatttttttttttttttttgagatggagtctcgctctgttgccaggctggagtgcagtgacacgatcttggctcactgcaacctctgcctcccaggctcaagcgattctcctgcctcaccctcccaagtagctgagactacaggtgcgtgccaccacacccagctaatttttgtatttttagtagagagaaggtttcaccatgttggccaggatggtctcgatctcttgaccccgtgatccacctgcctcggcctcccaaagtgctgagattacaggcatgagccaccacgcccagcagtatagcttttttagttaacaaagatatttgatccaagttggttcaacttaagaggtagaaccaaaaacatcatcctcgatgcctcttagaaaactgacctgcaaaatatccagactggcattacctgtggctccctgtgggagagaactttctctaggtcatcgctaacaatgtcatgcatgggtctccagccttgtgtccatcccgctcttccctttctcagcatctccagccacagcatttcagtctttcacacactcagtccctattagtcgccctgtgtagctttagaaaactagaacctcaattattatctttctctcctgaatctgtagcttcactatcaaattaatcctttacccttgcttttaattttttttaattatggtaaatacagataacataaaatttgccatcttaaccattctaaagcatacagttcaatggcattaagtacgttcacatcattgtgcaaccatcacaccacccacgaggagccggatttattatttcctatcccacgccactattcccatcaggaaaccatgccatcttaaccactattcccatcaggaaaccgtgccatcttagccactattcccatcaggacaccgtgccgtcttaaagtgattccctgtaagatgagcaatggaactttacttgcccagtagaccctttgtctcttaggactgggcaactgagttttaaaatggttttgatgcatttatatagcacgttagccaaagtgaatttcctctttcctccttgtctttaaacagctctgagcagcgggtcccctgttccacttcttaccacagctctgggttgcactcgggtgatggggtcaccaaagcaggacctatgggccttccagaaataagacaagtgccaactgttgtgattgaatgtgatgacaataaagaaaatgtgcctcatgagtcagactacgaagactcttcttgcctgtatacaagagaagaggaggaagaggaggaggacgaagacgacgacagctcattatacaccagtgcgttcatcttaactcatcaccaggggtggggaagcatgctattgtggaaagacagcagagagtggacccagcagcccagcagtctgggttctaatccctgctctggtgttgactggtcctgggtcgtagggcagcttagtctacctgttggggcctcagttcctacatcagtaagaggagagggtaaatgtcctctaaatgccctccttaaattccctcctagctctaaaaattactgccacctcctacctctttaagtggcttctttgttgcttctcttaggatgcaacttctcccccacccaaaaaaaactttaagaagtttaaaactctgtccctgtctagcaaacactcaaatactactcactgtgtatgcaacaaattcactttttaagcatacctcagcaactttagaaggcctcaatttaaatttcttatttatgacctttaaatgtgctaagagacaagagaagaaatgaagaaagcaaagttcaaaacctatcactctggccatgaacagtaaataaattttagttacgtgagtacagcctgatatttggccaactttttaataaatgaacttatgagaatagcaaccatgcattgaacatgtactgtgtgcctgacaatgggctacggttttaatctctcacctacatctcacaacaaccctgaggcatggacactattgcctcattttacagataagggcagaaaatggagagacaaggcgctggcccagggcctcacgtctgctaaggggcaacgctggggtttgatgcgggctctgtcacattctgaagctcatgttctaaaactagtggaggaagaaagaagaaaagcactactcaatcaagcccaaagccatcctcagacttgttgcctgctggcgttttctctcgctctctacttaccaggcttcaaatagctggctccaagtaagacctggtgagctatgaagggatccaagtgatgtcaaggaaagaaccacacagggcagccagagacctcaatgatccatgaatggaaggagcagctgctcagcccctgtttgctgttcagtatccagagaattaaatgttttatacagaggtttctcaacctcagcactcccggcatttgggaccagataattctttggtgtggggccgtcctgtacactgtgggatgtttacaggcatccctggcctctgtccgctagatgccagtagcaccctctgcctgccaccttagttttgacaaccaaaaaatgccttgggattttgccaggtgttccctggggagcaaaatcaccactggttgagaaccactgatttatatcagatgtagggaagccctgcctcagctgctcagaaatgctggggttgaaaagaaaaaacccatcccaggatattgcgtgtttcaaagccctcacctccactcccacccccaaccagccccactttgtccgcctaccttttttctccttcacgtccccccagctccagtgtagttgatcttttctgtctcttgagatttcctggtgtagccttcaccgctgaacttctgcagacacagatccccgcccacctgctgcctgttggactctcatctctgcttcaggtgtcagcccctcctcctcgtgaaacttcccctagttgctaaaagcctctgtcctatctccccctttgcagtccactgcaccccacagccagtcctgccctcctttgtgatgttgcctgcgtgctagacattcctggagagcagagacccaatcacaggttccccatgtgctgtccatgtgccccacacagtgctaggggtagagtgtgtggcaatggcaggaactctaggaactgaggcattaaccactttcaggtgttaaaaccttgatgacttccttcctgccttgtatcttatgacccagggttggccctgtgggagcccaggcagatatgtaagccttaattgactcatttctgtctcctacaggctccctggccatgaaggtctgcaggaaggactccttagccatcaaactcagcaacaggccctccaagcgagagctggaagaaaagaacatccttcccaggcagacggatgaggagcggctggagctgaggcaacagattggcaccaagctcaccaggtaggacagcggcaccctctgcctccctggcagtgggcctttagctctccaggttctagcaaaagaattcagtctcggccgggcgcagtagcttatgcctgtaatcccagcactttgggaggccgaggcaggtggatcacatgaggtcaggagttcaagaccagcctggccaacatggtgaaaccccatctctactaaaaatgcaaaaattagtcaggcatggtggcctgtagtcccagctactcgggaggctgaggcaggaggattgcttgaatctgggaggtgtaggttccagtgagccgagatcacaccattgcaccccagcctgtgtgacagagcaagactctgtctcaaaaaaaaaaaaaaaaaaaaaggaagagacaatggaaaacatcccattttgtctccaaggttgtttctatagtgccctctcctttatttatccaaatcttggaaaattcacttgattcaaggttcagggagaaattgagaggcaggtttccagggagaataatcatctgtagaaaagcctccatcatctggccaggcacggtggctcacaccggtagtcctaatacattgggtggccaaagtgggcagactgtttgagcccaggagtttgaggccagcctgagcaacaaagtaaaaccccatctctacataaaatcaaaaattagcgagatgtggtggcacatgcctgtggtcccggctacatgggaggttaaggcaagaggatggcttgagcacaggaggtcaaggctgcagtgagccattattgtgccactgcactccagcccaggtgacagagagagagagagagagaaggaaagaaagaaagagagagagagagaaaggaaggaaggaaggaaggaaggaaggaaggaaggaaggaagaaggaaggaagggaaaagaaagaaggaaagagagaaagaaagaaggaaagagaaagaaagaaggaaagagaaagagcgaaagaggaggagggagggagggaggaaggaaagaaggaaggaaggaagggaaaagaaagaaggaaagagagaaagaaagaaggaaagagaaagaaagaaggaaagagaaagaaggaaagagaaagagagagcgaaagagaaggagggagggaggaaggaaagaaggaaggaaggaaggggaaagaaagaaggaaagagagaaagaaagaaggaaagagaaagaaagaaggaaagagaaagaaggaaagagaaagagagagcgaaagagaaggagggagggaggaaggaaagaaggaaggaaggaaggaaggaaagaaggaaggaaggaagaacagcctccatcatgtaatagaattgaggacctatggagagataaggtgtggtttgattaagcacaaagcaatcagacaaacacactctctgatatacggttaagtggttggtagtgatgcttcattactccactgggactcattttgagtgattgccctttatgtatggatattacagacatgggcatagctttatgttatattaagatattaaccacccatgtatgtatttgtaatcaagggcatgtttatgtgacattaggtaacctttgttgagtacttactatttgccaccattctctaaacattttatatgtattacattgtttgtctttgagcctgtctataagatacaccatttgtatacccattttacagatgagaataccaggcatagagaactttggttactttgcataatgtcacacagcacagctctggaattctctctcttgagcccttactttgtaccagacactgttgtgagtgcctggacataatgtgtggaagtctaccagggcttaattctgattctccctcttactaggtgtatagccttaagtaagtcacttattctccttacctgtgtttctgcatatgtaaaagagtgagttgtgaaaattaagcaagttaatagaagtatttaaaacagtatctggcccatagcaagcaatcagttacctgttttcaccatcacctttgcattgtacaagtgagaaaggtggtgcctagaggttatgtagacataggcatcatccaacagtatgccagtattcttccctcccacctgatttattttgctacctaagagcagcttctttttcaaaattaacttggtttcctcttggaggatattgtaatggtacagggctttgtaaaatggtcaacactgatggatgattggacgtagtgttatgcagtctttagagtcatagaatgaaaacatctaaccacctgccacacacacatacatactttctgtcattgactgaagtaacatggccttctcttttaatacctcagtgatagttacagctctctagagagcctgtcccattgttggagagccttattcttagacattcttccaatattgaactgaaatctgtccatgccactcccacccattggtcttattctgtgttttctgcaccctcatcccccataacatggcatgctgtagcatacttgaagacaatgatcctggcttccccaatctctctcaggttacatagaacgagatctcggttctgagggtggttggggtgggtgggtgtggttctgggctactcctgacccagcttgttcaagtttacacattatcctctagggaatcagaaaaaagagaaggagcagatcttttattatagctccttcccctcacttcccattcctccagctctgctacagtacaaggagagccccaggtatgtgaggggcaaatgaagatttatctgcagatgggagtgagatgccagagcatctggctgccccagtgacctcttctgtgccaagtgtgagagagagatgggaagcataggaagtcggcctgtgaggctggccacctgcttgttcactgtggggtccttgcacctggtttagactaacacagtaaaaaagggcaccattgccccagagcatactcctaaaaagggagacaatcccagcctctcctgcctgaatacatatccacaagccaccaccatgattagctagcaaaggcagtcacaaaacccagaggtgggaagagacataaaccgtccatgccctgaaagaagttatctgcatctgaaatcttatcctggtaaatcagccctttcccaactcttccccttataaggacatccactgaaggtttaccatagtatacattgttcccagccctctttcattatggtggatggcaggtgtattattcagtttgctgctatgaagaaatacctgagactgggtaatttataaagaaaagaggtttaattgactcacagtttcccatggctggagaggtctcaggaaacttacaatcatggcagaaggcacctcttcacagggtggctggagagagaatgagtgcaagcagaggaaatgccagatgcttataaaaccatcagatctcgtgagacctactcattatcatgagaacagcatgagggaaactgcccccatgattcagttacctccacctggtcctgcccttgacacatggggattatggggattagaattcaaggtgagatttgggtggggacacagaaccaaaccttaccagcaggagaagacacatcaactagggacagaaagacaaagtagagaaggcagcatattcaagccattgagatggcctgcatccttcctctgaatccactttgtccttcactctttcaactagggagtttctttctttgtggtaagacccttggaagctctagccagattgcagggactgtacctaaaggacagactgtcaggcatgcctagcaaattggcaaagttgtacagagatcagcacatcaggcagataggccatatctatacctcaaggtcatttttgaggtagcacagccattaatgcagacccaaagagttttagggactattccctttagaactgagagctcaactctgtgcttctagccacccattcatcctgaagccagggcagaatgaaggggaaatccaagaaccaaaaagtgactgtggtagagagcgagctactctggagtagaagtttgggttctggctctgattctttcattccctagtcatttgccctgagggcattagactaggtcatctgattactgtgtgcaaaatatgtgctttatgatcacaaaaagtaactaaaagaatgtagacatgtgctgtagagttggcatttctgaagctacaaggctgcagcattctctggctattaatgtactggaaatcttaggctctttgaaaagcatgtggccaagtctgtggtcctcatggagtcagcaagatagaaaacataattttagcctgacagttccaataacataagaaaaaaaaaaagaccacgatgtgtagcattctaagaataatcccaaattgagggtgaggaatgggaaacagaaacaccaagtaaaatgatgtcaacttctgcagaacctcccagcattaaggcagagtttctacataaaaatgccaaaattactgtgcttccaaaaatgttcacttgttgaggctattgggcagactctactaagtctcaataagcaagtcatctggattttttaataaataactatttcagtccactgccattggagacgtgtggactgccccagagacatgaacattggtcaacagggttcacgttgctcctcctccatatgtatacagactttgaacttcaggatggcacagaggaccaaggggtggtgaatgatgccatccactggggtgccaggcaaaaattgtagagcttctatttacattcatttcatatgatcctttttaatatggttatttgtgcctgaattgtaatgcgcatggtgtatcactgcagtagtacctgtgtcttatacataaaggaatggtacctatggggacatttgcttagattcgtattgatgaagttctcttagaatccactggtttgagtgtcacttctcagtgctacatgagtagcacttttcatctccagtggacacacagagacctcagggcaatccctcaccccacctaccccgccccatgcaaaaccattctgcattctctctagatctcctcttgggattctgcatcctgaactaggaggtgccctgactatgggatcttagccatcagatctacttctagttctgttcatttgccaagctttttattcccaccagagtaatgttccctcatgactccattttgtttatttgaaatataattgaacatactactccaaaaaatcagtattaaaaaattagacacagagccatgcttctcaaagttcatagttagggtgccctgtcagggcgacctcgtgatctgccagagacagcatgctctggcacttcctcactttccagcctatgacactgacaggttggtgaagtgaaacccccagaagttggagcttcagatcactaggtatggggtgttctggaactaaagagtaacctaatgcctaacaagttgtgcttttgattctgaaacatcctataaaaagtcagtcattcagtaagttgatagggctactcatttttaaaggaagggactaagactccaaaacatgacctatttgtggtcagacaacagccagtctacttgggacctcacctagggaacggctagctcttcagacccaacagaggatcgactggcccagtcctctccaactgaggtcctctgtccccacccataccctctttgttgtttggaccagatgaaagaaaaagcctgcaaaagaaaaataaaatggaaagtgcctcaccatatacacaggagtttatcatctaaagtgagctcaggagtaaatgaggattggggctgtctacctccctgacatactccttcccctaaaatatcccttcacccttgaaatatcaccctcctactcaggaatgaactatgggcatttttttttttttggcagtcagagttgaccagaattttttcatcacctgagctggagcagggagactccccacttctagttggatgcatctctatgtagaagctcttggaagcctggtcacttggtttgggaaagaatatttctccttgtgatgtccttttcctaagctagacatagccaataatgcagaccactcacctatgattattcccaatgatcaaaggaagatactgactttatttaagctacttggtgtattcatttgctggggctgccataacagagtcccacaaatcaagtggcatacacaacagaaatgcattgtctcggagttttagaggctggaagtctgagatccaggtgtcagcagagttggttccttctgagggctgcgagggagcatctgttccaggcgtctctcccggcctctcgtgtttgctgggaatctttggtcttccttggcttgtggatgcatcacatcaatctctgccttcgtctctgcatgatgctctccctctgtgtgtatctctgtgttcagatttcccctttctataaggacaccagttatgctggattagggcccactaccccaccctaaagacctcattttaacatgattatccctgtaaagaccctgtctcaataaggggacattctgaggtactgggattaggatttcaacctagaagttttaggaagacagaattcaatccataacccttggagaagtttcaagtgggtttacctagagaagggaccatgaccccaaatgcatgtgggaagagacagatattgcacagaagtgaagcagacagtgaggagatgaatagggagtgttaggaacaggggcgaaatgaaaagtccacccttgcatcaagaggccatcactgttcagcttcaaccccctgttgttttgcaaaaatgaaggactagtttgttagctcttctgaaaaaaagaatctggatttttaaaatgacaatttcaatttttttagactttataggactggcacagtggctcatgcctataatcccagcactttggggggccaaagtagaaggatcacttgagcccaggagtctgagaccagcctggacaacacagaccccatgttgacaaaacaaattcttaaaaattaactgggcatgatggcgtccacctgtagtcccagctgcttgggaggctaaggtaggaggatcccttgagcccaggaggtcgaggctgcagtgagctataattgtgccactgcactccagcctgagcaacagaatgagacccctcttttaaaaaaaaaatgagataggcaaaaatatatatttgtggactgaattcagcccaatgactccatctcagttctgggcctcctgttttaaatcttggacctggatggtgtagtttattctatttatagtatattcatgaagtctgtgtgcatgcactgcacatgccgaggagacaatgagacaggaatagtaggtatgttgtaaatgtaaatgtgagcacgtgtatgtgtatatcagtagcaatttaaaattagcatctgtagaatccaaattagtttgaatgtacagtcatacattgcttaacgatgggattacattttgagaaatgtgtcaggcaattttgtcattgtgtggccatcatgaagtgtactcacacaaaccaagatggtagagtctactacacactaggctagatggtaaagcctattgctcctcaactacaaacctgtgtggtatgttacagtactgaatactgtggcaattgtaacacaatggtatttgtgcatgtaaacatagaaaaggtagaataaaaatacagtattataatattttgggaccacagtcccatatgcagtccgttacccaaaggttgttatgaggtgcatgactttacttatttgtgtggattgattgttaatcagtatgccatattcctaaaaatgagcacttgctccaggtctttgttttaggaatttagttagcttgctgcagaatgtctacaagtgactcctgaagaacacattaatttggttgaggctggtgaagtagcgtcactgctttcttttccttaacacccacagcctgggaatcagacgggtttaaggttaaagcacctagtgacgctgatagcttcaatctacactgaaggcgtggaaactggcactaagccccatggggtagatcagatgtagttttctccttcgtaaaggaccgaaattcttcctcttttctctcctcctcactactttatcattactgtgacttagtgaatgagatagtgagataatagtctgatcatctccatgaaacctagtatgttactctgtcttatttagaatttcataatatgctagatagaaaaagtatcctaaatctgtattttatactcctaagtagtctacaccattgttgctataagcagaatatgaaataatatgtaccaaggattatgcgctgctttaaatcatggtacggtgttcaagagagaaaattgaaatccattttttatgcttgtagcacaggcaataaaatacagtaatcttgacttctaaatgtagtttgggtagtgtttatggttggggaaaattggtgcggtgagtctgacacaccgacacctagctccaaagtgccaaatagtgtctccccaggaatctaaggactaatgctgagtgtgagctggcatctcccctggctaggtaatttcttctgctgcagaaacactttctaaaaataggaataacaataaaaggctctatgatgtcaattcaacttggacttacttagtgtccctggatacgtgtcactgtgaattaccactccaaagaaaaaaggaaggaaaatagactggagtgaagttttagaggccatgcttgtaggcctagcccttgaggttgtgcgccattatcatcaccatcatcatcctcctcctcatcctcatcttcatctcagctgtggaggagcagggagtggggcacagcttagggggcacaggagagaaacggaaagaccgccctggtattcgctcatcttcagatccacaaagcctgggtgggggtggctcaggccagggagacttcccataaaactgggaggattctgagacctcccataaaactgaaggaagacgccagtcaccaaactgaaattgtgtgttgggagcaagtcaggtcagggtgagcataacttgaatgtatttattgagttctacaacatttgtaccacaaatgcgtggacttcgtgtagctaagctgctttcaggtaatttgacatcttttatgaactcactgcacgcaatagaaaatcctttttgagagctctttgggaatgctgacatcttctgaaaggtgctcagatgagctcaggctatagcactacctgtttgatagaaagttaaagaaaccacatgttcgctggggcttatttaaaaaaaaaatcaatggaaggtgagaaagctgtctggataagaagacttgagcaagacgcattggaaggaggtagaataaaacttcaaaaccacacatgtagaggttctggcattgagccatgggtcacagccatcacagggacctacagccattgaacatgtctcagagcccttgcagggatctgcatggcctcttgccctcttacccagcctctagctgttaagagctacagcaaagactgaactcttgacatcctgttgctaggacagagtttctgagcctcgactctgtgtgtatgtccatgcctgtgtgtcaggaggagaggaggccccgtctgcaagcccagtaccgcatgttgaggagcagagccacatcttggagagcaccgttagttctctgcatctgtgacttgcggctgccccggcagtctgtacatttttcagtgatacagtaagtgtggtggacaaagagctgccttttacccagtgggaacacaatcgatcttagtgtttaaacttgcaaagtttctttaaaaaaaaaaaaaagtggccattcttggaggttgtgagtcttactttgttttatatttcatagcttttttaaacaactgattattccagcagcatttcaaattttgggtgcagggggtggggagagcacagctatactcaactgcagactaagcagggaatggatgaatcttctgggctgcatggtcacattttaagaggctcttcttagggtagatgaagaggaagcttcaaagactgggctgtttattactcacagcaactttttgttctcaggtgattttcccctaatctgtaatgattgttcttgtttgttaatctaagcagaaggcagaagaaaggctgtgtttcttaggatattcgttgtgggtttttttttgttgttgtttttttgttttgttttgttttgttttgagatggagtctgactttgttgcccaggctggagtgcagtggcgcaatcttggctcactgcaacctccacccgccccaggttcaagtgattgtcgtgcctcagcctcccaagtagctgggactacaggagtgtgccaccacacctggctaatttttgtatttttagtagaaatggggttttgacctgttggttgggctggtctcaaactcctggactcaagtgatccgcccacctcagcctcctaaagagctgggattacgggcatgaaccactgtacccagccaggatatttggctaagtgaaagaagaatcaatccatctacatttaaagacctctcagggcgaaggtccctgatacgtgccatttataactttaaagcctgttgctgtagataaagtgtttccccatcagcacctcatctaataatctccatgcaaccctgcaaggtggccgctactgggaatcccattctgtagatgaggaaactgaaccaatgatctcagagatgataaagggcaaagagaagcacatcttctaaatccagggttttcctatttctggcaaacccactggaaaaaatgtgtagtttggttgagtttttatgttgaacagagcttccctcccaaggacctgtggtttggtaggtatcttggtggactgtagagttccacagtggcagtgggtcaagctatgtgcaaatgtactcaagggagagataaggcatggaatgaagaagaggaaaggagatgttcttctatctcgggcttaactgggcttttttattgcatttcagtaatacctgtgcctgttgcaatgtggggaacagaggtccaatgcagtggttctcctggtgtggcccttgggctaatggcatcagcatcccctgggaatttgttgaaaatgcatattctcaggccccaccccagacccagaatcagaaattcttgggccgggtgggaggtggcgtgcaggaatctgcattttaaccagcatgattctgatgcacactaaagtttgagaagcaatgggctagtaagaagagaaatcaaagactttggagctggacctgagcttgaaagctcttcaccacttactagctgggcccctgtcaagccttagtttccacatctgtaaaacggacctcccacacaaggtcatccagagcaccaaatgagtaagactttcaactgtagtagataatgaatgctagttccttccctctcctggtgagtctgaatactgtatcatgctcgactcttattagaaaaagtaatgctgggtgggcgcagtggctcacacctgtaatcccagcattttgggaggccggggcaggtggatcacttgatatcaggagttcaagaccagcctggccaacaaggtaaaaccccatctctactaaaaatgcaaaaaaaaaaaaacctagccaggtgtggtggcacaggcctgtagtcccagctacttgggaagctgaggcaggagaatcgcttgaacccaggagatggaggttgcaatgagctgagtttgcaccactgcactcctccggtctgggcaacagagtgagattctgtctcaaaaaaaaaaaaaaaaaaaaggaataagtaatgctagttgccctaacaggaaaatcctaaatcccagtcacctaaagcagcaaaggtttatttctcactggagttaagcctaatgtggatctggtagccttgatccgtcagatagccattacatgcttctagaacacatgactccaatctcaatagcaagggaagagcaggcagaggaggcacacacatcacttctgctcacagtccattcatcagaacccaatctcacttcaagggagtgtggaaaacatagagaagcacacgcagtgttggatgagcgtaaaggaccttttccacaattccactgagcctacagttgccacacaggtctttaggtcatgattcttgcacttgtgtaaagggactgtcacagctataagagacttgattaaaagactttccacaattagcagttggaattcaggggcaccaggtacatctgaatggagcatatcacctggattgccagaggggtctgtcttggggcgagtacatggaggtcactaatgcccatggtctatatcaatgaatttgcacctaaggctaagtttagtaaagcaacttatggaaatcaaaatgatctcaatttgagaaaacagactcaaaaaaatcaacattgcttttgctttaaaggaaaaactagcttaactacaactgagaaatcacaaaaaggaacagtggactttgagctcgagtgagtttgttttatatgagtttaaggttaaatttccagggaaacaagttactaagggagaacatgggaacctcagcttcagccagttgattcagttggaaactattgattaagcaccaactgtgtgcacagctctgtaatgggtgttatttaaaaggtagctagataattatgcttctcagaaggtttagatgagtgagtcaaagtatgcttactgttttctgctttcaactggaaaagacacagcaagttccatgaagaaggcgcagatctctctgtagcaaattcttttatgggtgtgaatgtattttagattatttctcttgccatttttttttcctttaaaatatcccccaaaagaatgggaatgagtcagggctctgatcatgtaaacactgaataatctgaacatctgattctgaggtttttttcctcttaaacttgtgcattaatgtgaacaacttcaacttgagttgtcagaccacttttttttttttttttgcgagatgttctttttttcttttctacaaccttataaccacttatgagcttaaaacagccacaaagatgtgtcatttctctcataattttaccatgaaaggatttctcagtcacttgtgaacttaccaggaggcaatgaataaactctgatttaaatcattttatgaagcatccaaataatggcctaaaccttggttaaaaggtgattttactgcagggaatattcaaatatctcatctaggcctttcagactggctcagagatttttgtcactgtgtggaccttgggcctatgacttgttggaaactctttaatgagtttcttttaaaagaaaaaaaaaaccttaggttcaagggtacacgtacaggtttattatagagataaattccatatagtgggggtttggtttacaaattattttgtcacccaggtaataagcatagtacctgataggtagtttggtagttttttgatcctcaacctgctcctaccctccaccctcatgcaggccccagtgcctgttgcttccttttttgtgtctttgtgtactcagtgtttagatcctacttgtaagtgagaacatgtggtatttggttttctgttcctgtgttagtttgctaaggatgatggcctccagctccatcagtgttactgcaaagaacatgatctcattcttttttatggctgcatagtattccatggtgtatatgtaccacattttctttatccagtctgccattgatgggtattttttcaggggacctgccccgataatcacgtaggttcttttctagtttccctaagcatcggctggcttgagaaataaagggacagagtacaaaagagagaaattttaaagctgggcgtccgggggagacatcacacgttggtaggatccatgatgccccacaagccacaaaaaccagcaagtttttattaggggttttcaaaaggggagggagtgcgcgaataggtgtcggtgacagacatcaagtacttaacagggtaatagaatatcacaaggcaagtggaggcagggcgagatcacaggaccacagctgccaggcgaaattaaaattgctaatgaagtttcgggcaccattgtcattgataaaacatcttatcaggagacagggttttgagatcaaccagtgtgaccaaaatttattaggtgagaatttcctcttcctaataagcctgggagcgctatgggagacaagtttatttcacccctgcagtctcaaccataagagacaggtacgccccggggggccagttcaagttcagagacctaaccctagctgcacattctctttctcagggatatcccctgctgagaaaaagaattcagcgatatttctcccatttgcttttgaaggaagagaaatatggctctgttctgcccggctcaccggcagtcagagtttaagtttctctctcttattccctgaacaattgctgttatcctgttcttttttcaaggtgcccacatttcatattgctcaaacacacatgctgtacaatttgtgcagttaatgcaattatcacatagtcctgaggcgacatacatcctcctcagctgacaggattaagagattaaagtaaagacaggcataggaaatcacaagggtattgattggggaagtgataagtgtccatgaaatctttacaatttatgtttagagattgagtaaagacaggcataagaaattacaaaagtattaatttggggaactaataaatgtccgtaaaatcttcactatccatgttcttctgccatggtttcagccggtccctctgtttggggtccctgacttcccgcaacagtatttaggttgattccatgtcttcactgtgggcagtgaatagtgctgtgatgaacacacatgtgcatgtgtctttatggtagaatgatttctgttcctttgggtatatacccagtaacgggattgcaaggtcgacgggtaattctgttttaagttctttgagaaatagcaactgctttccacaatggctgtttacaatcccaccagtagcatgtaagcattctcttttccccacaaccttgccagcatctattattttttgactttttaataatagacattctgactggtgtgagatgatatgtggttttgatttgcatttctctaataattaatgatgttgagcattttttcatgtttgttggccacatggatttctgtttttgtaaagtgtctgttcatgtcctttttaatggggttgtttgttttttgcttgtaaatttaagtttcttatagatgctggatattagacctttgttggacgtatagtttgcaaatattttctcccattctgtagcttgtctgtttactctgttgacagtttcttttgctgtacagaagctctttggtttaattaggtgccatttgtcaattttttttttcgttgcaattgcttttggcatcttcatgaaatctttgccaggtcttgtgttcagaatggtatttcctaggttatcttccagggtttttatagttttaggttttaagtcttttaatctatctcgagttgatttttgtatatggtgtaaggagcaggtccagtttcaatcccctgcatatagctagccagttatcccagttctttggtgagtttcttcacccacttcacaactgtatcattaggatctcagagtgtaatagaacattttagaacttaaatggacatttactatcactgcatctagccttaattttacaggtaaatggctgatagaggctacactactagccaagttcacacagtaatttctgacaaactaggatttaaaataaagtcctctgacccagtcggtgcttaaaattaatatctctcaaaaaagagagagaaatagatcatgttttactggaataaacaggccagttgttagttagcaaccataacaactcatatatcttcgttgattttctcaaaagaaaaataaataatgtggaggttttgaatgaaatctttaaaaaacatattcagttatcaaaaggcccatgtaaaaggaatccttgaattctcccacagatacattctttcacggccaccatgatcttccttgatcccacttagccaaaagaacactgaaattaaatgtgcgagcgaaagatgtttccctacctggatggctgatggttcattacagctgagcaaagtctcattaatcattttgaaaactaggcaggtactctggaaaattcttttgctggtaccttaatttagagttggcctattcttgtgattctttcaaatgataagtgaaactctaatcatgtatacttattaagaattatctgttctttgtttcagtggtgaagttggcatttccagtctataatttccattgcatatagtgctctttctccctcacccaccaaatttggcttcaggcttgatgggatgtgatttttctgtagcccctatacagagcttgcacatggacctgaatatttaaagagcagaacgagattacaactgagaaatttgcagtacagttgttcttcacgtgtccccatgtatctttgtttactggcaaaacacctcgaatctcatgcaaaatgctaataggaataattcattttatttatcttcattatgatcatttcactcctcttgggatgccaagacttttataatggcctcaaaaattgcatacatgcctaactaaatagtaattttgaggcagaatgtaaacagggaaaagcatccaaagatacaaccctggaaaatcacttttcctctaattctaaaagcaattcctttgaaatataagtgaatacacttctattttaggaagtgtgttcatgaaaatttgatcttctgtgcccttcaactcattaaaacaacagttattcaaaatgggcagcctctttagtgtctttgaaaagaaataggtagacagataaacagtgggtgcagacaggtcatcagtgtattgaaaagaggtttgcctctcctgtaaatccaaccgtcctttcgactgttaggattttcctcattttgctaatcttcacattgtaacttatcaagttccctcgtgtgtgtgtgtgtgtgtgtgtgtgtgtgtgtgtgtgtgacggagtttcatttttgtcccccaggctggagtacagtggtgccatctcggctcattgcaacctccgcctcctgggttaaagcgattctcctacctcagcctcccaagtagctgagattacaggcgccagccaccatgcctggctaatttttgtatttttagtagacacggggttttaccacattggccaggctgatctcgaactcctgacctcaggtgatccgcccgccttggcctcccaaagtgctgggattacaggtgtgagccaccgtgcccagcccaagttccctcttaaaagatgccaagacagataattgcatcttcctatacactaacatgacattgtggaagctaggcatgcacctatagccccagctgctcgggagactgaagctagagaatcacttgaggtcaggacttcgaggttgtagtctgcgatgatcaaacctgtgaatagccactgcactccagcctgggcaacatagtgagaccctgcctctttaaaaaaaaacaaaaattttaaatgacgttatgaaggagctaccatcgacaaatttggttcaaccaatgaatctaccacctgcccattctacccaaagaagcctggttaatgtggcatttcaggtgaagccctcagcacatcctccttcaattactcggcactgcctttatattcatggaactgtgagcaggcagcttctccctgaagcctgccatatcagtacagcacatccttgaagcatctctgctgagcagccttggccctcgttgtggtggttctctgtcaagtttccctctctcttcacagttcttaatgaacagagccatctggggccacagcctgtgaaatctgattctcttcccacagtcagcaaacagagccactgggatatgctcaggcagctcccaggaggaaaccgtaaatgcatatagctttgtctaggcagaaataaagtgagctcattcattcaaaacaaaacaatgaaaaacattgtatcacgtcagctgcaggctacctaattagttaaaatgtatcataaatgtgtatcacatattaagtgatctctatgcattaatttgttgataatatagcatcgaggtatttataaaattctatggaacatgttttgaacttgaaaactcgtcatttctataaaatctttcaaactgcctgtttggcaaataaacttgatatagggggaaattctggtctcttgtgtgtgatcacggttatcctcatgttgaggtgatcgcaaagccccaaagtgagagaccctgttagaggagataaatcatcattgtaaggccaattagtagacggggcaataactcatattgggagaagcatgcctttagctgccgtaagtggaggaactcacagctgcagccacatccctgcagctctgatctgactgcagagctaccaaaaatctaatctgcatgtgtgggctaaagcacaagcaagggacagaagactggaagccacagcggagagaaagttggcataaaaagcactctgcaaacatcaaaatcgcgtgccaactaagcaaagccaatgcataagctataatgtcttctagatattttattgagagtgataaggatgatgaagaacgagaggaggagaagttaggtcttccgtcctcccttgccagccacagttcctaactgtaccatttttaaaggtttgattaactgttcgtggcttatcagcattattctttgcagccttttggccatgctcgtgtaggggtgcccaaacccccaggctgtggactggtatcagtctgtggcctgttaggaaacaggccccacagcaggagatgagtggcgggagtgagcattactgcctgagccctgcctcctgccagatcagtggcggcattagattctcagaactgtgcatgtgagggatctcggtttcacgttccttatgagactctaacttacgcctgatgatctgaggtggaatcaccccaacccctgaaaccaccttgcccccaaacccccatccatagaaaaattgtcttccatgaaaccagtccctggtgccaaaaaggttggggacagctggtctagtgtgttaaaggccccagaagattacatttttctggtcaggggtatgaactacactaaaatgtgtggtgattaagccgggcgtggtggctcatgcctgtaatcccagcactttgggaggccaaggcaggtggatcacctaaggtcaggagttcaagaccagcctggctaacatggtgaaacctcatgtctactaaaactacaaaaattagccggatgtggtggcaggcgcctgtaatcccagctactcaggaggctgaggcaggagaatcacttgaacctgggaggcggaggttgcagtgagccaagattgcaccactgcactccagcctgggcaacagagaaaactccgtctcaaaaaaaaaaaaaaaaaaaaagtatggtgactaaagaatcacctatttcatttttcattgggaaaccaaaataatttccgtcttgtaagttatgaccatttatgtggttctgctccactggctgatgcttcaaggaaatagttttcagacattggtgacactccatggtaggggcccaccagttgtggcccacagactgaacccaccccactctctgtctttgtcaataaagctttattggaacacagttacactcattcatttacctgctctctgtggctgcttacacaccataatggcagagttgagtagctgcaacagaaactgtatggcccacaaacccaaagtatttactatctggccctttgaagaaaaaagaaatgagacatttaaggacctagactgaggacattagagaatgtggccttcctctcacagtgctgatcctagatctatttagaaagtgcatgtgcccgaaatatctccattagagaaagaaactaaattcatcctcacacacatagggatttcctttgtgctcattactctaatcatcaaaataatcccatttacctttacttcttagtccagatccgcctgtgaagcatcatatagcatacagattatgctgggaatacggtccagtttttcaaacttgatttattacctgagcagttagaaaagctacttcaaggacaaccaggtatcattgaaagcagctcagctcagctgccggccagataagaaggggctggctgtgcagacagactgagagaaggaatctgtgtaagcagaaaatgtatgttgtccttaagaaaggaaggccacagccatgccatgcaggcttagcttgaaaataaatatcagcaggtgtgagaagtatgttcctgtttttgcagctgaagctagattccaagtcctgcaggaaaaggtgggggctggaaggagggtcgccaacgagtaagagccagatactaaaacatgactccttgggcgcaagacaggtctgggcgcaagacaggtctatcctcaagacaggtggtgcacaaatggagtgttacacagataggaagagatgtggcaagagctctggcaaattgcaaaaccgtggaatatgcttgggatgtgtgtaacactgtggtgaagagaggctgacaaatcctctacatgacacttattgtatgaagaaaacatatccattttacacacacacacacacacaatcaatcttctgatcagtgaaaggagctactgacagtggtccctgtgcatcgtccacatgcctctcccatgagtggcagccacctgagaagggcagctttcagggccccgagtggctgtgtgtccctgtctgctgtgggtaggattctgcctgccaggcacactcagcctcccagtgacctcttgttagagacacatcgggtgggatgctggccataggcgggcgctctcctagaagggggagatggctcctgtgactgaggggaacgttacacaatcagtcgttccctcaggatggaggcaggtgtttatcttcactgcaggagttggtttgtctggtgctccctgagagggacattacggtcacgggtgcagggctgcaaataggatctgtccaggttctcaccggcctccagctggggcatttcagcatcaagaaactgcctgcccatgtgctgggggcgctgtggtctctgatgtctgtctggcctcatataggggagggtggggatgtattcatggtgcatgtgtgtgttgagtgtatttgatgtgaccggaatgtgagaaaataaaacaaaaaaccataaggaagggaagagaacacggactaatgtgtgccaggctgagctctgacagtcctatggcagataccagctctaaattcagcctctctttgagtctcctatttgaaagcagttatctgcgctctcaagggctctctctcaagccattgagtagattagctgaagaattagtgaaaaatcatttaaatttatatatataataaggggattgagaggctgaggcaggaggattgcttgaggccaggagttcaagaccagcctgagcaacatagcaagatccccatctctacaaaaatttaaaaattagctgggcatggtggcacacacctatagtcccagctactggggaggctgaagtgggaggatcacttgagctcagcagtttgaggctacagtgagctgtgattgcaccactgtactccagcctgaacaacagaacaagatcctgccttaaaaaaaaaaaaaagaaagaaagaaagaaaaggccaggaggcacggtgacttatgcccataatcccagcactttgggaggctgaggtgggcagatcgcctgagcccagggcagatcgcttagaccagcctgagcaacatggcaaacccctgcctttacaaaaaaaaaaaaatagaaaaaaaaaattagccaggtgcctgggagtcagaggttgcagtgaatcaagatcgtgccactgcagtccagcctgagcaacggagcaagatcctgtctcaaaaaaaaaaaaaaaagaaaaaggaaagaaagaaaagaaaaaagtctaaaaaagaaaaggataaagtctatttgaaacttccatttgactctccattttccattcttttccttctttccgtttcccatataaatagatcctttcctggataaataactcattccattatttccattattaaaattccatctatcctgatctcattataattaaccaattttcaaagaatgcaaaaatacaaatctacactggttagacattcttaaaatctgccatgctgctgttattaaaaaaaaaaaaagttttgggggagaggagaggggtctctttgttgttgtgtcacatctgcagaaaaatgtattttgtgaaagagtatcggccgcaggaaaacacttagagattaatgagagtatctatattcataccattcctttgggctacaaggctattggcttaaaaatgaagctttatgtttaaatttatggaccatgggtcaggaaaggtagggaaaatgagacttttattaaaggagaattatagaaaacttagcaaaatattgcagccaaaacccccctccacttgagcatctgagattccttggggtttttgtgttttcgtttccaggtttctaaatagcatgagatctcatctgaacttgagttgttattgtttccagaaacaagttcagaagagactttgggagacagctggaaggaaaatagctgtggccccactgaatgaggagggaaaggatcgggattcctgccacccgtctcctggcttcttccccaccctctatcctcagccctctccttgggaagtatgatcgccccaaaatgagagattggccctttgcgggtgacatttaaaacacatgagctgcacatgttctgtagctcctaggaggaatccacgtgttgcagtcagagaaagacatggaaggaggcaccttgttgcctatttttaacgtttcatcccttgcttacctttgaaaaatgattggtgggtgcatgtgttgtttattgaggcccaactaagcacaggcattggagaaatctagaaccatggtactttgtgaataaatgaatgaatgatgacatttttctgttgtctgggctgtgcatatcaacctaaccacaatattgcctgtgacagtccctctctatagcaaacaccagaacttcctctctttatttgatcactctttgtccttgccccacagttctgtaatcatcagaagcaacactgcttagagaagtaaggacaataagtacagtgatacctagggtaagccttcagttaagaaaaggaaatctggatgtccaccaccatctgaatctcagcaaaagacctgctttagactcagcagagcctaagcatgcccacagtggtgggcatgttcggtgggtgtatcctgggtccaccagcagtctcctttcctgcgggaggtcagctgcatggacgtggacatctgtgcctccacattgggcagtggcagtgattaggcattgctgggagacctcactgaagggctaagacagtaaaggaggaaaatgcccaatgccatttgataattgcaggacttgatttggggcacacattagaaaccaactggggtggctgggtgcagtggctcatgcctgtaatcccagcattttgggaggccaaggcaggcagattgcctgaggtcagaagttcaagaccagcctggctaacatggtgaaaccctatatctactaaaaatacaaaaattagccaggcgtggtggcacatgcctgtagtcccagctactcgggaggctgaggtgggagaattacttgaacccgggaggcggaggttgcagtgagctaagattgcaacaccgcactccagcctgggcaacagagcaagactccatttcaaaaataaaataaatataaaataaatttaaaaaaaaaccaactggggtatcccagaattaattgaggtaatttgcaaacattagaggttatgtatttttgtgacatggaaaattgttatttataagtcatctgaatattttttggcttagtcctcttagttggagtattgggcccagtgtaactctctatccttaaagagaaatggtgcaaaggtcatctaatctgattgccattatctgtcactgttgatcaccaggattgatgtggttatatgactatcaaagcaagtgtctccttcctctttggatatccatagtgtcccaaatctgaataccttcatcaaaaaggaagacgttctctatcatgatcttcccatcagtcaaggttccagcaggaaacagatggctcctaattatgataacctgaggagggtttatttacaacagaactaattataaaggtgtgggcaggcttcagaatccttctcaacacagagctccaggctgcctttaccaaccaaccagagttgacaaatgaactgtacctgtttttcagtgtgactcatgtagattactgttagttgcatcttccataagagccaagaaagcaatagactacttatctatttttatataaagacattatagataggaaattcttatatgcaacaagttaagagaggacataaattctgaactgagaaagacccacctcttagctccccaaggcaggaaagcaacacatctctgtattagtccattcctgcactgctataaagaaatgcttgagactgggtaatttacaaagaaaagaggtttaattggcttctaattctgcaggttgcgcaggaaacatagcggcttctgcttctggggaggcctcaggaaatttccaatcatggcaggaaacaaagtggctgcaatgtgtcatacatgctaggaacaggagcaagaggcagtgaggggaagatgccacacacttttaaacaaccagatctcatgagaactcattcactatcaggagaacaacaccaaggggaaggtgctaacccattcatgagaaactgctcccatcattcaatcacctcccaccaggtcccacctccaacactgggtattacaattgaacatgagatttgggtagggacacagatccaaaccatatcattctgcccctggcgcctcccaaatctcatgtccttctcatattgcaaaataaaatcattccttcccaccaatccccagtcttcactcattccaacattaactcaaaagtcttatctgagacaaggctagtcccttctgcctatgaacctgtaaaatcaaaaacaagttagttatttccaagatacatgggggtataggcattgggtaaatacttccattcaaaaagggagatatcagccaaaagaaaggggctacaggccccatgtaagtcctaaacctagcagggcagtcattaaatcttaatgctcctaaatctcttttgactccatgtcccacatcccagccacactggtgtggatggtgggcacccaaagcgttggccagtgctgcctctgtggcttttcagggtttagcctccacagctgctctcatggactgatgttgagtgcctgtggcttttctcggtacagggtgcaagctgccagtggatcttctggggcctagaggacagtggccctcttcttacagctccactaggcagtgccccagtggggactctgtggggggggctccaaccccacattttccctctgcgctgccttagcagaggttctccatgagggctctgcccctgcagcaggcttctgcctggacacccaggcttttccatacatactctaaagtctaggcctcaactcttgtactctgaacacccacagccttactacaatatggaagccaccaaggcgtacagtttgcaccctctgaagcagcagcctgagctgcacctgggcccctttgagccatggctagagctagagtgactgagatgcggggagcagtgtcccaaggctgcacagggcagcggggccctaggcctggcccatgaaaccattcttccttcctaggcctctgggcctgtgatgggaggagctgctgtgaaggtctctgaagtggcttccaggtcttttccccattgtcttggctattagcacttagctcctttttacttatgcaaatttctgcagcctacttgaattcctcccctgaaaatgggcttttcttttctaccaaatggccaggctgcaaagtttccacttttaccctgtttcccctttaaatgtaagttccagttttaggtcatctttttgctcatgcatgtcagcatatatcattagaagcagccaggctacattttgaatttggctgcttagaaatttcttctgccagatactctaaatcatcactctcaagttcaaagttccacagatccctagggcagaggcacagtgcagccaagttctttactaaagcataacagaagtgacctttgccccagttcccaataagttcctcatttccatttgagatttcatcatcctggccttcactgtccatatcactttgagcattttggtcacaagccattcaaccagtctctaggaagttccaaatgttccgtcatcttcctctcttcttctgagccctacacactcttccaatctctgtccattacccagttccaaagtcacttccacatatccaggtatctttatagcaataccctactcctcagtttcaaatttctgtattagccttttctcgaactgctacaaagaaatacctgagactgggtaatttttaaagaaaagagattgaattggctcctggttctgcaggctgtacaagaaacctagcagcttctgcttctggggagtcctcaggaagctgccaatcatggcagaaaacaaagggggagtgaggcatctgacatggcaggagcaggagcaagagagagaggaggaggtgccacacacttttcaacaaccagatctcatgagaactcattcactatcaggagaacagcaccaagggaatggtcctaaaccattcatgagaaaccacccccatgatccagtcacctcccaccaggctgcacctccaacactgggtattacaattgaacatgagatttgggtggggacacagatccaaaccatatcaatccctaacttcatagagttttattatacatcataatcatctttctaattcccacccatccagcaccttatctggaaaacgttcatcagatatatcttaaatcatattgaattaagtaaaatggaaataaaataaaataaataaaggttaaacccattggtctaaatcacagctcttgactcctctgggatcttcttacttccacaggatagaacacaaatctcacgttttcccttgtagatggaggctgacactttgcgcatgctatttctttccttattgctcagtgacctctgtcttgtcagtagagtcatatgcaggctgtctccacatcttcacatctctctaaccttacctgcttgcatgtccacccacctattgaagcagcctccttcaaccttttatgacagcatctagagctgttgttctcaaactttagcatgcacgtgcatctcctggagagagcttgtaaaaccagcacagatggctgtgccccactctcagaccttctgattcagtagctccggagcccagtggtttgcaggttagagagcacccaggtgatgctgacgctggggaccacgctgtgagaagcactgacctgggattcttcacaatcctcagtgcaggtttgaattacctgcaaagcttaaacaaacaaacaaaaaaatacaacaggctgggagcagtggctcatgcctgtaatcctagcactttggaagcccgaggtggatggatcacctgaggtcaggagttcgagaccagcctggccaacatgatgaaaccccgtctctactaaaaatacaaaaattagctgggcatggtggcgcgtgcctgtaattccagcttctaggggggaggcaggaggattgcttgaacctgggaggcggaggttgtagtgagctgagatcgcgccactgcactccagcctcggcgacagagagagacaccgtcttaaaaaaagaaaaaaaaaaaacagtgcttaagctctactttcatacattctgatttaattggttaagaatgtggcccaggtttaaggtaacacaggttattctaaggtgctacgggaatgagaaccactgacatagaaaccatggcaagcggcagagatcaggaaaagagacaaaatgctgtagcaagaggaccagcaatgggcttgaagttataagttcagtgtggtttttgttcccactagtctcgtgaagggtgatgattggcagtggtggccctgcaccagttttgcctcaatctcagtcttttcctttgatcagatcatgttaagcttcttgaagactctgacagagggttacttaaaaaatgctttgtgctcctagaaagaaggttcattttttgccaaaggtacctggtagagctctttattggaaaggagcagggaaaagcaaaggctaaattttagtttttaaggtgtgaggagaagctaatagcaaaagataaaacatggtctatatttgatggcagagctttttaaatcatctgtgcgtggtcattcttgctgatgttgtttttatatatagctctaactgaaagcctagcccaatttctggcacataatacacgcagggatggttggaggagttaagctaaaggtgaccaaatctcctgagtcactttaaagtggtggagcactggacatttgtcttttattctgtatttcctagctttttggcatcacaatgttttggcactcattttgatggattcttcttgtaaaaatagccttgttgaaatgactgtcttaatttctgttgtaattaactaccttaatttctgttataacaactcagatactctttcaaagtggaatcatcctgacatggggtttatgtccaataatcctaataatactgaaaatgttcactgtgcaggctctcaaccgtctcactgttttgtttttcaatggatttgatgcctagtaatacacacagtcccatcattactccaaaagtgatttccactcaacatgaccagcaatattacaatacttttttgggttattatctcagtgtctcatcttagccacaggccattgcactggggtcatagcctccagagaataaagccaaaaatattcttttaagcgtaacctgtttatctatttcaggtaagggatttttttcaagttaccaaaaatagtatttcatgctttgtacttatttttaaaagggactttcacatctaattctcctttgatcctcctgacagtcctacacagcaggcgggctagatgtcattatgaccatttgtcatatagtgaaattgggcatggaggggtaaggagatgtcatgtgctcaagggaccttctgatgagtggtgcaggcaggccaggatgcgggcctcagggccccagttcatcttcccccctctgtgctctctcctctagccaggctaactgttcttagcttaaggggaatgacagaaatttgaaaatcattgatggaaatgcctgggaagagctgggcgtgcggatcaatagtattaagagttgttctgctcagtttgcagagagaaaagggcatagtactgaggaataaaagcaaaactgctgttcagccctcccagcagcccctcttctgtggcaggaatgccttcccatacgcccagcattctcattcatcccatgggcacaactccaggggcgagagattattaatttgtttaacataaaaaatcaaatgagcccctattatgtgccagctgctgtactaagtactaagaacacagagataaataagatgtaattggtggttttggagcattcatcgtccaactgagaagatcttcatgtacgcaggtatcaccaatgtaatggataaggccatcgtcaagatggggaactccatagacagaactactacctctgcctggtagaatcagaggaggcatctcagcttccctaaactgtgaatgtgctactgggttgtcctactgtgaataagggagtgaaggtaaatgaggcattgtggccaggctgtggtgtggagtgaattcaagcattattcttagcgcaatgtcaggcggtggaaggctggtagcagaggagtaaaacaaccaagctatgtcctccccgcctcccaacttctcctctgccccttcttagcactaaaatactaagaattttgaccaggactggcagttaaagtattctctttgttccatcgcacagagatgaaaaagctgaggcttagagaggaatgccgtctcattcaagatctcacacttgttaaacagcaggctgacccaagctggtgactggcatgcatcatactgcccaaagccactctgaaggatagggcacccctgggcttttatcacacctgagatctgctgagtagcaggaattaggaaatattaagagagaaatatgagactattagtcaaaggtatcatataatagagaaaggtttagtaaaataagggctccaaaaggccactggattagacaattgaatcatcgatgaccttatcaagaattgattcagtagagcaaggcttctcaacctaagcactgttgatgctttggactgaatgatctttgtggtgggggctgtcccatgcattggaagatgtttagcaccctggcctctatctaccggatgccaacagcaccctctcaatcgcaacaaccaaaaataacttcagacattaccaaatgcatcctaggaggcaaaatcacccatgctgagaaccagcacagtaaagctgtgtgaacagaagccagactggagagttactgagacctcgagcctggaccaccctttcgagaggtctggcagccaagagcagacaggtgagaggggtgagctggaggaagaggctggcgtaggaggacagctttgttcgtttgttgttgttttaaagagttttatttctaatggagaatacagttgtttgccctaaggaaagaaccaagaaagaggtaaaggttaaaggtaaggaaaagtcaccaagtagcatccatttaattatttcacaaacattaagcatctccagttaccagactctgtgctaggctctgcagatgtcatggtgaacaagtgagaggttccttgttcaaaagataaaaaaatattgaaaagtttgaaatggcaacagagcattaaaccccaagcaggaagcccttctgtgcaggggtggagtaggagggtgttctgtgcacctgctcagattctatggacaggaagctatccctggttgtctaagtgaggcagaggtggccctggcctcacagagtgtaagccttgttgtctggtgaataggacaggcaataaaagaaagtaaaacaagcactggggtatggaacatgcaggaatattgttgcacactgtaggacacctaaaccaagagatttgcagacagaggaagtgatactgaagctttaagctgtaacgttagggattattgtcagttagacagacaaagaggaaggaaaagaatggtaaggctatgaggaagggcatgcaaatctggaaggaaccaagaagagatcattctgggtgaaggacagaatgggcagattcttgacaggcaggtagccagatcatgaagaatctttcagaacactgagtgttttgactctgtcctgtgagcactgtaaaggcatacttacttttcaagcacagagtggtgtgatcagatcggtcccttagaaagatcattctgtatgggctggaggaggaccagagtgggataggctggcagcaactgggagagatgctgatggactgcttccccaaggtggtggtagatggaatcagagatggtttggatataggactcttggtggttgattggccatcaagagtgaagttcagacaggatgattcccagtttcatggcctgggcatctcactaggactccatacaagaccacttggagaggaagatgtatgggggaagaagatgagttaattcatttgggaccctttaagtctgatggcccataggagtacaagacagcagttagaaaggtggccaggaactcaaaaatatgactggaggtttagattttggaatcatcagcatattgatgctattggaagtcatgagtgttgatgagatcatccaaggagcatgtgtggcatctgaactggtgggatctgggttaaatagttactaaatgagcatctattatgctctctatgctctcttaggaactggggatgtagtaataaccaaggccagacagaaatgccccaatcctcatggaactcataggttctcaggaggaagtttccaaaggatgtagaggggatagaattcagtgcttctccctttcccctgatcccaccaagcccatctacacttctggatacctgttagaaaaccccatctcctcctacttttggagagaggatcttattttctgtcattctctgtgaggacttttgcatttcctctttccatctgtctgaaaatgcagttacctttctctggtgctgagttgcagaaaacccaagttaattctgtttttcctttgtcctgaaatgcagatacagtttcagagatccagactttaaaatcaaggccctcaaaacaataagcagttgtaaatgctaatgaaagctgtgaccttggtgttctggaaacggcagaaagcccattagctctgtgcagcacaactaatctctgtcagcctcaacaagtcagaccaacaaaacctacaagggttttgtcacttctctagggagatgctgtaatgtgcaaagacaatgctgcctgctctgcatacatttaaagcatcttgccactacattctctaccagtcttctttttccaaggtcaaaactgaagtgtcctttattttgggcttttagtgtttttttttttttttttttttttcagtctttccatgcaaaaagaaaacttcaatttatttgattatttcttatggtcaccagtagagacagcattgttcagactgaaaaaaaaaaaaaggcaagatccattcttaaatttttaaagaaaatagaaggctcacatacagcacttgatagcatgtggcatttaaacaggaacccagagattttttcagttcactgaatcatttagccatagtccatggtaaagaaaaaaccatttgaggcatggaaaccattttgctgctcagacatattttataaaccagggtcacatatatagtagcaaagctacttaagatcccttgaaagtacattaaacatttaattttggatgattcattttatgtaaaaatttatctccaaaaatcattgcctttgacacctagcaaagtgatcacgtttagatatacagtcaggaattttgtttaatttaatgttagttttaatcagatacaactagttaaatctactggcaaggtgggagcaaaggagatacagtatattcaggaggcatcttgactttgattcttggagttagcagctccttgggatgattcatacaggtgaccacgtcgtcgtgctctgctgctcagctttctatgttaaccagtacttaagagatgcaccaggtacatcgatcataaaatgagccaagcagatggctgctttgcttggtgaagatggcaagatgccctgggtgtcccccgaaaattttgatgactagaattccaaagctggagctttatgctttgggtttgtgaatttgtctctgatcaaagacaaatctcccagtgaatggtaaaattttaaactaaaataagtcatcttcagtgtatctcaacttgaaagaataagcaaaagctatcaattgggaactcttctataattccaatacggaacattgcaaatctacatgcaacccactctgtcctgcttccctgctgtcccagtaaagagctgttcttcttccactcaaaaataatgctacctccatcccttggatcccaagccctcctaccttctcaggactcatgcactaccaattgggcctttccctttttatatattcagcttctccctccaccccccaccatctaatctggattatttccattaaacatgccccattttcatccattaaaaaaataaaatttgggctgggtgtggtggctcacacctgtaatcccagcactttgggaggctgagggtgggtggatcacctgaggtcaggagttcgagaccagcctggccaacatggtgaaaccccatctctactaaaaatacaaaaattagctggtgtggtggcatgtgcctgtaatcccagctactcgggaggctgaggcaggagaatcacttgaacctgggaggcagaggttgcagtgagccgagtttgcaccactgcactccagcctgggccacagagtgagccctcatctgagaaaaaaatacgatacaatttggccaggtgtggtagcttataacagtaatcccagcactttgggaggccaaggcaggaggacagcttgaacccaggagtttgagactggcctgggcaacacagaaagacctcgtctctaccaaaaattaaaaattagctaggtatggtggtgcatgcctatagtcccagctgctcaggaggctgaggtgagaggattacttgagtccgagaggttgaggctgcagtgagccaaggtggtgccactgcactccagcttgggtgaccagagtgaggccccatctctgaaaaaaaaaaaataataaaataaaataaataaaataaaattccaccacagcctccttcacttctacttctctcacccgcttcaaagccaggcttcgtggctaagtcctccagcttcggtgcatccatttttccacccctgtcctcagccctctccaatctggcttctcttcctgccacgccactgaaggggctctaggtgttgtcagtaacagcctccatggtgctaaacccagtgggcatttttttcaggcctcatctaaccttacagcagctctcagaactctttgtgggccatacctatcatcttactgttaacgaaaagattgacatgcaggtcaaaggcacttatttgggaagcaaaaatggcagctggggtacaccggatcagggcagccctgaagagtgccctataaggcaggctgcaggagagaatttttaaaatagaggattgtcataaaaagttattttcggaagtagttcattggccaggcagaaatcctaaatcacaaagccgttgtgattggttagttaatgagagtactctcagctgaggtgttgaaggccagcagatgctgacttcagttgtttgaccgagtctattggaacatcccctgggtttgaccttcagcaggtgtgagtgcgatcctcttgcaaccttcgactccacttcagaaagccttagcattagttactatattttctttcccattacgttgcttccatgatatgacattttagtcctcatcctacctccaagaactcccctccccagaatccatggcagggtcatcctccttagtccatgcattaaatactggaattcggcaaagttccatcctaagccctcgcctcttcccattctctactctctccatactcatggcttcaaatattgtctatattgcagactagtctcagatttctatcactggcctagtcctctcctctccactgagctaaatgtatcctgctgcctacatgacagcttcattcatatgtctcaggagcattctgatgtaacagatccaaattcaaattcatggttttcttccactcttccttcacaaacacgctggttctcttgcagtgtgcctgcctcagtgaacagcattcccatccatctagttgcatgagttagaaaacctaaggagatatcctgtacacctgcttcttcctgtccattcacatatgctacctgacttcctaagagcttgcacatcactgccacagcctcgcccaagcctccaccatttcttaccaggtgtgccaagcctcccaaagcctctgctcgggtttcctcttgcctcccccaatcccttctccatataataaccagcatgatctctttccactgtaagtctgatcatttcattcactcctcccctctcacaccctaaaacttaaactcttcaacggcttcacattgctcctagaaaaagaagatctaagtcccggaagcatctgtattaggccattcccacactgctgtgaagaaatacctgagactgggtagtttataacgaaaagaggtttaattggctcacagttctgcaggctgcacaggaagcatgatgctggcatctgcctctggtgaggcctcaggaagcttccaatcatggtggaaaacagagggaaagcaaggagtctcacattggaggagcaggagcaagagggaagggtgctacacacttttaaacaaccagatctcgcgagaatgcactcaactcactagaacagcaccaagtggttggtactaaaccgttcatgaaaaactacccccatgatccaatcatgtcccaccaggctccacctccaacactggggactacaattcaacatgtgattggcagggacacagatccaaatcacacccacggcatctggcccctgccctccttcccaccaatcttctctccttactctctgcccagaaggagcatccttcttccatccctgagctctgggcacagtgtcacttcctcctggaagcctttcctgacctcctgatttggtcagatccagagatccctgcaccaagtgcctcaccatggaagcccttactccagctacattttgcactcatttctgtgactgtttgattaatggctacccccatcctcttccagtcttctctgttccagaagggcagggactggttttgctcatcactgtactctggtacctaatgtagaacctgacacagcactggcactaataagtaacttgctaaatgaatgaatgggtttacatttgaatgtaactgagtctgtggcacccatttctaaaacaggtcttgataggaatgagatagagcaagagtgataacataattctaggaactcgagaggggaggactccagggaatagagtcaatgcagaaccacagacactttatcttcttcacagttttgccttgtgcccagtgagccccacttccatgtggctgctgaatggtttttttctgactcacctcttgctggccaactgagatgctgcaagaatgtacagtgccttctacatgggcagtgaaagtctaagtcacgcccaacttgcttgttgttttgaggatattttattacatgccagtccttggaaactgttgatccagttttaccttgcacattgtaatcacagatgtgcacctctaggctgtgagccgcttaagaatgtgtctggcccttcatgtggcccgtggttcatgttgggtagattagcagatgaaagacttaggaaaacaaaaattggaattcttatcatttgatctcagccagcgtctcaaactcagaggccctcgggggtccaggaatgatctgaaaaaaaaaaaaaaaaaaaaaaaaaaaaaaaaaagcaggacagatgtgagcgtgctcacctgtattacataagtgaggcctggggagagggctaatttgatcacacactctgtctaaaggcattcaggctcaaaaaaagtataaccagctgggctcagtggctcacacctgtaatctcagcactctgggaggccgaggtgggtggatcacctgaggtcaggagtttgagactagcctggccaacgtggtgaaaccgcatgtctactaaaaatacaaaaattagctgggcgtggtggcacacacctgtaatcccagctactcgggaagctgaggcaggagaatcgcttgaacctgggaggtggaggttgcagtgagctgagattgtgccactgcactccagcgtgggtgacagggcaagactctgtctcaaaaaagagaaaaaagtgtaacctctgagcatgccaaagagaactgatagagtcaaatccagtgcaccaggcatcagtttgcaacctctgactagtaaagtatcatagttatggcagacaaaatattggccacccttccacaagatgtccacatcctcatccccagatctatgaatatgtaacgtcccagggcaaaggagactttgcaactggaattcagttaaaaatcttaagataaagattaaatgaactaacatatgtacagtgcttggaaccatacccttacattataggcattaaatcagccttagcttattaaactagtatttatgatttgcagagaaaagagcataggcctagcaggatctgataccttgtctgaggtaaataggttcagagcagagcctggactagaacccaaacctcctagctcctgagctacttagtgctttgtccttacaatgccaccatatcattttcctcccaaatctcattttcaaggtcaaaacaactaactatagcacaggcccttctggcgggctcagctgcatgttatagctatgattagtcttgatgttctcagtcgctttccagagaaatgaaacacaaacagaggaactcatttgaaattatgagtgtttgactataaagcagcctagttaataacagaattttctctgatcagagtctagtcactcagttttgccccctccaaatatgaccacccataaaaaaaaggggaggccaccacagagccagttgtcatgttcactaatgagatcaatgggatggcaccgtcaaagctgatgagggaacaatgtagtctgcagacacttcgcataagactccaaaacactggcctgatctccaaatgtaggcgccacccacatttacaaggctttctcaaaacattctgcccccaaaacttagcttgacttaaagcctgggtattaccaaaccattccataaaagtggctgcgcatctcttataaaagcagcaagtatttttagggaaaataaactggcaggtgagaaagagctgttaagatctttcaacgtggagttggtaagctgcattccagacctctgacaccggctcactcagttgcataatcatcgctttcctcctgcagcgtgagaatgctattttagaaagaattcaaagactactgcatccaaatttagaccccctaatattgtgaatttccaaatacacagctggcccttgtcaatggggatgaaaaatgtcttaatgggattgcaaagagaaaaaacaaactttgactgggagcagtggctcatgcctgtaatcccagcactttgggaggctgaagcaggtggatcacctaaggtcaggagttcaagaccagcctggccaacatggtgaaaccctgtctctactgaaaatacaaaaaactagcacggggcatggtggcacgcacctgtaatcccagctactcaggaggctgaggcaggagaatcgcttgaacccgagaggcagaggttgcagtgagctgagatcgcaccactgcactccagcctgggcaaaaaaagctaaactctgtctcaaaaaaagaaaaaaacaaactttttttcactctactctcacacttaacacacttctgtgaccccacacatttctgtgtgaggcagctccccacacaccaagcaattctccagcagacatgaactggacatcctgtaattcaatttgattctgaccctttctactgggacagtgtcagatcacacaggttaaggactcagtcccacagaactgcccccacttcagatgccaataccaagtcataggttgtcacctatattatgacccactagctgtaaactggggttctcacaactccctctttgtgttcaaataatttgctaagacagctcacagaactcagggaaacacttactttaccagtttcttacagaggttacagatgaacagccagatgaagagatggacagggcaaggtattgggggagagaggcagagcttctgtgcactctctgggtgccaccctcccaacagtgccccccagccccatggtcagcaacctggaagctcatctaatcttgtggtttaagagtttccatagaacttcacctccagccccccaccctcctgcttcccagctgaaagctccaggcctctaactatgtgttctttctggtggccagccccatcctaagtcacctaattagcacaaactctggtgtaatccaaagggactcattccaagtaacaaaatacactcctgacaccccagaaattccaggggttttaggtgctctgtgataggaactgggtcaaagataaatatgttttatattataccacagggatattttgaaaaggaataataaatatgaaaatgttcttatactcttaaaaacactttggaatgcaatttccaacagtttcagggtgctataggctttataagcaggtatatgaccaaaaatcctttctctgacattgtattaggccattcttgcattactataaaggaatacctgagactgtgtaatttataaataaaagaggtttaattggctcatggttctgcaggctatacaggcagcatggccctggcatttgcttgacttctagggaggcctcaggaaacttccaatcatggaggaaggtgaaggagaagaaggcacatcacatggcaaaagcaggagcaagagagagagagagagtgagcagggagttgccacatgctttttttttttctttttttttttttgagacagtctcactttgtcacccaggctggagtgcagtggcgcaatgtcggctcactgcaacctccacctcccaggttcaagcgattctcctgcctcagcctcccaagtagctaggattacaggcatgtgccaccatgcccggctaatttttgtatttttaatagagacggggtttcgccacaaagttttaaatgaccagatcttgcaagaactcactgtcaagaagctaggaccaagccatgagggctccccatccaagcaccttgcaccaggcctccccccgagcaatggggattaccattcaacatgagatttgggcagcgacaaatatccaaactatatgagacattgaagcccattccctatataggatgtgtggtggtgacacgggaatgtcacagaagcaattgattctggcccagcacaataaacaaaaacacaaatgacaacaagctttgaattaaaaatatagtcctttctgggagattgattccaggactcccttggataccaaaatccaaggaagctcaagtcccttgtataaaatggcgtagtatttgcaaaaaactatgtgtatcctcccatatcctttaaatcatctctaaattacttatatctaatacaagataaatgctatatcaataattttagactattgttttttgtttgtttttttttttaatattttccgtcagcagttggtagaaccgaagaatgtggaactcatggacacagaggaccaactgtagttaggtttggagacttcattgacttgatattttcactctaggatctctctttagatttcaagatgtgaacatcttgccgactatagacaccagtttctaatacccaaggagggactgcaacttcctcaactaggagagcatcatttctaccccttagatcccaatagaggagtctgagaagcctaaaatttcttctacaatgattcagtttctcacacacctcatcccaatgggtgaagtggaatgccggataattgcaggttgttaaataattaccaaaagcttcaaaggtacagatgtctctgttcctgctcaggctcctgagtccgtgtcagtcattcctgggacctaatgcaggcattctcccctcagatgccatgcccgttccctggctacttctgtcactacgtgccatccactgcctgtcccgcctccacccattgcgtcattgcaggctcatgccctggctatgatgtttcatgtacggtggctaaatttcacgcctggccacagaagtatcatttctgtgcctttgccactcatgtcttctaagcctccgaaataagaggagcaggaccagaagaagagcagccattgttctctgcagacagacacattctctcacatgtccccggggccacagacctctttatgttctaactgggtctgcacagaagaggcaggagacaggctttagcctcaagggagggagagagaggcaagaggccacagtccccaagttaggaggccacaaggaaagaaaaggacttctgtgaagaaaagagtcccgtctgagttgcagtccacttgcctggggccactggaggagatggggctggggaggggccgctgcagggaggagggcgggggtcagcggctgtgacatgacgcacgtgcctctcctgggcttgaaattgaggaactgaggaggcggtggtggcgagagtcagtctttcagagcacaggatggaacaagaactccagccactgactgtctcatgtatctgcaagggccgaggaaattaatgacccaaggaggctatgatatggtccaaaaacttttcctggattttttccgtaggcggctgagccagaggccaactgcagaggaactggaacagaggaacattttgaaacgtaagtgactaagcccatggcaatccctgatgttttgtggcggcttttgttattatttaatggtaggccacaaggtttctaccttgcgcctctgcggaaagcattgaaaacctttctaacggttgaagcttcatgtgtgcatgttagaacaccaaagacgacctccccaaagagaaggcaaattttattccactttattctttagaagctcacgggcggcaggcagaaccttccttttagtgagttgtaaagtcagagagaagctgaaaaattagagtgagaccacttattatttaatgatttttaagagcagggtcacctttaaaccagaattggcttgaaaatggagactgtgatatgcacggctaaaataagggaaatgtccatttgaactgagactagaaagcatgactttgcattgcagctggctgctgttgataaaaatccctcatccctttgaatgttaaattgaaagactaagaaagcatttccaagtgaagtgcttcatgtctgtctctcaggattcccacagctggtcccgggcatgcctgtctgatgctctcattcgaggaaaactgcctttcaccattgctgcagacagaaaaaaataaatgagccccttgtttggtttaggacacagagacatttgaatatgtacagaggatccacttggtgctttaaaaaaaaaaagagaaaacaggatacaaaatactaaaagagatcaagcatttgatggacagcagtatgcgtcagtttagtggtagatattaaataacttaaatatcaaaccattctattcattcattgctaccattctcgccaacactggcctcaagatagtgaacaaatatttctggcttaattcatgaccctgttccccctaccccacaacacacttctaatttctctccagaagagaaagatatatactatgcagagttttctagaaatgctatgttgtacagactgactccttgcctcccccggcccccccgccccgccccgccccgtgcccagtaaatcacatgcaaccgcagtgtgagtttgccgggaatttccactgaaaccacactaagatattcttgactttacctttctaccgtgctcactgtggccttgtgacttggtcggcatttcgtagtctgctgaaggtgggtgctgggttccgctttggtggggagacctgttgcctacagcacccacccccgcccgacgcccccgcatgtccgtttatgtcaactctgcctttatcaatgtcttgcctcccgtccccacgccagccgccacttcctcaactctcagtagaagttattttcaggattagccttcctcagtcgtgggggaaccctacgctttgcctaggtctctaggaatgtgtgtttacttttttctgcccaaggggtaccctttaaagtttccaagcttaatattctatataatgaattcagagctttttcaaagcatttccaaggtcagggaagcatttggcttgtaggatgtcttcctttcggccccaatctggtacctgagccattataaacttcccattgttggagagaaagataaacagccaggtgaacctgtacaacttactcacagcccgctgctgtacttgtggcctctgacctgagacctaaactcaaagaagctaaaagcctccgggggattatttaggtttcagaaaatagtgcttatcacaccaggagtacggtttctggagagatctaaaatcccctagctcagctctgggctctctcaaagatatcagatccccgctgtggcttgtccagatccctgggagactacaggtcctttgagcttgggtttttaccgccatcaaccagggaacttagattcaggggaccaaaaaggagttgtgaaagattgttcccatggttctcttttattctcttccctaatccctcttgtcctggccacatagttgcaaattaaagaactacttgaccaattctaacaggttggtcatttcatagttttgaaacttttcagaaatcaacttgttttcccataggttcttatttttccctgtattctggaactatgttctcctaaatatttttttaaatttaatctattgcgattgttaaacaaaaaaaatgtctagtggtataagaaaacatcctccaatagtttgttttaaaactgattttctgagctttcagccatttgaggaactgctcggtgttgggtggtggggaacagggcacagagatgccatggctcagccctggagctttgagagccttgggttggtttccagccccaccctgcctggtcctgggagcagcccctgttctgtccagcagccagtgaggccctgtgcacctctgagcacataatgaaccctctgacggtggcagctgtaatgacgacatcgtaggcctttcctggcctgtcttcctagttgcctaatggggttgtcttggtaccttctgcctgaaaattcatgaacctgggttggtcaatggctttgaactaaaggtatcaattctgtaggtggtagcttgtggccccacccctcagagtgacctaagaaacgcacataggagatgaaggctccatgctgtgtcagctgtgtcacaggatgcccgccttcacggctctgaagggacctgtaggatcagaagtctgaggctagtaatgaggaggagagccggccccacacaaaacatgaccacaggaaaaaacctatctgtgtaaccactgagccaggtagggtgtgactggccacttaacacccctgaggcttcagatcctcagttataaaccaggagtggtagacgaggtggtcactaggtcccctcatggccctagtattctgtgcttctgtaaattttcaccgtgtgccctctagctgtccctggtgacccaacatccagaccaccttttcttccatccgttttcccacctgagacatcgcaaaatgggagttccctccttctggttcttgctgtctgcctccccatttaactctgctagattaattcatactaagatattaatggctgactagtttaataggttttatcccactgaaatttgcatttgtacaaatgtcactgtctgggggctccctacttccgggtgttgctgtctgccccccagtttatctctactagattaattcatactgagctattaatggctgactagtttaatgggcttttattcaagagaaatttgcattaaaaaaaaaaaaaacctctccgggagggagataggatctctaaatccaaaggaaagcacactcatggtgacggtttcaggcactgtagggtaggctggagcagggacctctggtgacctcagcccacagcaagatgtggctgtttcttgtgctgcctttctacaaagccttatgcccacaggcggttggggggccaaatcaggcccgtgggggtggccctcaagggcctgatttctgctctgaccttacaccacttgtgctagtgggaggtatagtcaccttgagtgtaaaggtgacacagttatcagatggtccccacccctttctaggcacagggggtttccttcctttaaagacctgtcccaaggccgggcgcggtggctcacgcctataatcccagcactctgggaggctgaggcgggtggatcacctgaggtcaggagttcgagaccagtctggccaatatggtgaaaccccatctctactaaaaatacaaaaattagctgggtgtggtggtgggcacctgtaatcccagctactcgggaggctgaggcaggagaatcgcttgaacttgggaggtggagtttgcagtgagccgagatcatgccactgcactccagcctgggcaacagagcaagactccatctcaaaaaaataaaaaattaaaaaaatttaaaaaataaaataaagacctgtcccatactgagacaatcagcaaccatacctgaattgcatgtgtgcaccaatacaacaaactaatgaagttaccaaaatataattcaacaactgtgattttcaaaatgagccaactagtgtcccaggcagtcgtgatgcaccctatgccaaaatcaacgtgtttccttttactaacgccatttgaaatttaacggctgagaatcacaggccttctttgatacaagctgacttccatagtttttccaagtccaacaatgctacgctgatatctgtgcttccacagatatcaaggaattcttccaaggttcagaagggaaatggtctaccccaggtcatccagttagcttaaaaggagaaataagcccagattctctgcccttcaagtatctgccccctaccccagactctcccatgtacagctatttaaaaatctgatgagtaaatcacccatatattaaggcaagagctttcaggctctgcagtctactcttctgagccactcctaaagagtctacatgcaggcaattgtatcccacactctggcctcacccatgctctgtggacttcatggaagattcaaacaatcgatggaatcagggcttgtgaaaggtgagcgttttgaaattcctcctgccttgtcttgttcctgcagcaggttgagggcagtcttctgctctctctacacccacagggcaccagacacaaggactataccacaatgagcctccttcagtgtctgggaggctcaacaaagaatgagtgagccccagtcttatccaaagaaaggagcctcacatctccccaaatgcctgtgtgtccccgtgtcaacattcccacccacctccttgggctgtgcggtggcttgcacctgtaatcccagcactttgagaggccaaggcaggaggattgcttgatgccaggagttcaagaccggcctgaacaacatcatgagacccccatctcaacaaaacatttttaaaattagtcaggtgtggtggcgtgcatgtgtagtcctagctacttgggaggccgaagtaggagaatcacttgagcccaggagttccaggctacagtaagctatgattgtgccactgcactttagcctgggagacagaacgagaccgtgtcaaaaaaaaaaaaaaaacctaccttcctgccttgtagccacatttctcaacccagcatctctgcctggagacctgaaaccccatgtgatgtaaagaaggcaaaatgacaaggtcagcctgctcagtagcaatttgaaacaacgcaggtagtttggaaagcaatccccataaggagaagggcagctgggggaggggacaggagtactctcttccctttattaaaatgagatgcttggcctagagcctgccaaggtccaaaggatgcacctgtacacaacactgtttactgaaataaaaaaacatcttaaatattttttttagctcggaatgaacaagaggaacaggaggagaagagagagatcaagaggaggctaacccgaaaggtaggtggttctccatgccaagagctgggacaggagagggtgggctgcctgccacacctctgccctctgctggcctcagtggcctcaccgctgcctggttcctctcctcctgtgtcagagagtgccactctcttactctataagacctctccactcagcttcatgaccctcagtcctttcagctggtgacactcaatgttgtttgattttgtgacacccacctacttcctaacaactcgatggctattgcgttgtatttttgattatactaaatgttttgttttacaaaattcactataatcccattaagcaatgggaaattcataatcaaaatcagtagttcaaaggccaggttcagtggttcatgcctataaacccagcactttgggaggccaaggtgagtggatagcttgaagccaggagttcgagaccagcctgggcaacatggtaaaatgctgtctttgtcaaagtaaatatacaaaaactagctgtgcatggtgatgtgcacctgtagtcccagatacatgggagtctgaggttggagaattgcttgagcccaggaggcagaggttgcagtgagccgagatcgcgccactgcactccagcctgggcaacagagcaagactctgtctcaaaaaaaaaaaaaaattactagttcgaatattacacaattatttgctatgaccctgggaaagtatagactttttttttttttttgctccccctgacactattctttccctaggaattaagaactatgcaactttattaggctaaattacgaaagtactgacaaatttaaagcagatgtttgagaagcacatagcttaaagtcataaaactggaattttaatatagtcttaaccccaaaaatagatggtttggcaatgcactgtagcctcgcatgcatctcattccacatgagtgtcctctttaataataaacgcattgttaaggctattcttggatgatgctgaaaagtttaattaattgatgacatgcaagatacaatactcccttctgtctgacgaagtcaaagtgtttttaatcagcctcctacagtgaccatcttgagagaaagatactctcatatcttagctacagttaagaggcccattaatattaattttaaaaaggtttattagtggatttttctctccagaaatatcacacaaaggaagaaattcagagatcctgaaatatcataccaattattaaggtgatggtttgtatttctccacactttccctgcgagcatcccaaatacctggtgacaagccaaatgccaacccaattagcaagagctggacaaacaagtgcctgaatggccagacgactggctggggtcaccctggtggagactagagcaagagctaagtgacttcaccagccagtcgctgtcccacccgtcaaggttggaccctttacatccttaagcccacccactctttggatgcagggtgcagtttttcctgagcttgagtagtgagaagagcaggagagatgcattagctttttctcatcgtgtccttgaaatgactggggctcgaaaaagacactgtgataaactttcatttctgatacagaaaggtctagacacttagaaaaaaaaaaagttgtttaaatcagattttcatcaaatttttcagaattggttgctggatccccaaaattcacccagttttaaggttgcttgctaaaagacggtcacagagaaatacttagacatttatttaattcctatctcttaacaaagttgatatgattttgcggagaacttgactaactgcatgatttggtaatgagcgagtaaagagtcttcctttccacacccatctccctagggtaggtgacactagggatggggaccccaaatagttcataggttttgcgggtctccacaatcaaataattgcctctctgttcctgctcacctctcctttcttctcccagggaaatggccttggaattttagcatttgccctcccctgggactggctgggggggttagaaataaggagcttgagaggggataactgcttctaagagagagactggagaacagaggggcaacttccatatctgcttttgcgggcagagatgtggcgccttccggcaggtagggaacctacatcatcacttcctggccctgtgaaggttcttctcctcttgagcatttatcacactgagaccagatgccagtgatgggggctgctttacagtgatctgccttcagcccaataacttcttcaataaaattctatttaactgtaatgcactagtaagaaaaataaaaaataaagcgtagtaactgaggctgatagcaacagaccagtcattttctctgaccaaactgagactaatataaaaattacatgctttgtctttttaaaaaagacatgcctgcggccaggcgcagtggctcacgcctgtaatcccagcactttgggaggccgaggcgggcctgactttggctgcaaagattatttttgcagcattcaaggaaggacttcaggttccagatgccccgaaggctacagccagcaccaggccaaaggtgcgtcttctgagcctttcgtggtcagggacatgagcccatgcacacagaggagcgtcctggtggccgtttgttagtgctggggtccgtgcaccaactgtgactctgagaggcagcagccagctgcatcctcgctcattccctctgagcacttgtgctctatgctgtcttgatttggaaagacggtgtccaaggccccgcgatgttcaggcataagaaacagcccctgacctgcagcatttatgcttagtcttcggttcactccagactctgccatagataggacattagtaaaatccaggtcagtttccaggaagagaaatttgaaagtcagggcttaacaacttttctcacatcatgggtgcactcagaaaataaccctttgggccgggctcggtggctcatatctgtaatcccagcactttgggaggctgagaacggcggatcatttgagatcaggagttcgagagcagtctgggcaatatggcgaaaccctatctctattaaaaatacaaaaattagccggacaaggtggcgcatacctgtaatcccagctactcgggaggctgaggcaggagagttacttgcacccaagaggcggaggttgcagtgagccgagatcattgcaccattgaactccagcctgggcaacagagtgagactccgtctaaaaaaagaaaaatgaagaaaagaaaataacactttgtctggccccttgaggtaaacccagcaagtcctgaggaacacagacaggattctgagtaggagtctgtttatctggagtaaatatggcaaatgttgcatgtctttatgtattttaattatagcacaaaatctccctgcactcacattgtggagaacatgttttggagtcaggatgactgctgtttttgtttacggtgaccacagccataacagcctgggaagcctgtgggttcccgcgacaggcccacactggtgccagaatgttgtcgtgcctaagaaagccaagggaggcctacatgcagtctaggcaggggggccggcaccagaggcggctgagcccctgatccccagagcttcctgcctttggctgagagggagctgtaggcctgccttggccctgtccggggtgtgccaccactctatttgatacctgccagccatcctctaattgtgctctgccagcgtgggagcaagttggaacattctcgcactagccacgggtgtctggaagctgcctgttgcagagtcgaaactgccagggtggtttggactccattgtgtttgttttacgggcctgagttgcaagattctatgagatagtgtcttctagtaatagaattacacagagtctagggctcaaagggaaaactgcttttaaatagcattgattgaacatcatttgacagcatcttaaagagagcaactgtgttgctccaggagaaataaacctggtgacaggaagagataatagaaatgtcagccttatgttgctaaagtagaggaagggtcttcatggctaatatcgggagatggcaaaatacatacgaatcttccttttacttgcttcatccctcattcctgcagtccttcatcatgcaccatccaaagggctggtcctgagtctcccttggcataaatgtggcctttttctgtacttactcaactccgcatttgttgactgaccttccccttgaacttcttgcagagggccgtcagcaatgtttgggctgacctcttcagccagcagattcccatccctgcataccccagagtttgcataccatttgcacatacgcttttttgcatctaaaacccacacaaaatgcactgcaaaacccccttgcagaaagcactcgatgtgacacagatgtggattcacaaatccaaaataagacagaatcattgtagaatgtccctgtcacctggtgggagtaggacagataagaagaaatccacaacaggcgcccacagccaaacagaaagacaagcttctagtaatgactgggactcagcaatgttatgaagatagagactgtttactatcgatttgtataggtgtaaaaacagtactgtgaatatgctttgaagtcctaatctttatatattctatactgaaatatacacagataaaatgatatgatgcctgtgatttgtttcaaagcaatctacatgtggatgtagtcaagagttgattattgttgaagctggtgataatacaccaaattcattacattagtctccttccttgttttgaaaatttacataataaaagattttttttaagtttaaaaaaaaaaagagcttggcctagagggtatgtaagggataacaaagctctctcttaggacctagaaacgtcccactcccaagagtcaggagacttgggtccccccaccctggccctccccctgcccctgcccctcactcactatgcgatgcatccatcgcctcactgaaccttattttccacacctgcaagttcacagacaggaccaagtgccatggtcaacccttctggctgactgggtccatctctctccctccctgcagctcagtcaaaggcccacggtggaagagcttcgggaaagaaagatcctcatccgcttcagtgactacgtggaggtggctgacgctcaggactatgaccgcagggcagataagccgtggacccgcctcaccgctgcagacaaagtaagcagaggggagtgctggagagtgggaggcaggaccgtctgctgggtctcgctgggctcaccgctggggagcgtgtagggagacctgcagccaggcctcagccgcagtccccataatggagtgttgagaccccaacacctttccccaggggccacagataatctgcggaaaggctgctgaatcggagaaaacacaaggcacataatactgtgcccattttacaggaggaggagcagcagcctgggaggctgtgcccagagaaagagaatagcactggataggtgtagacaggtgaaggcaagaggctccaggctcatcacagcccttccgtataggggatggtgctgccggcatccaacgagggattcaccaaaccaaaagagaagacaaagtagacgcataaccccaggagggaaatagggcataaatcaaagagacgtcgcaaaacatatctcactgcactagcccctcgccgatttagaaaacaaaaagaataatctgaggttcagtttgttttttaggaaaagcagtgatgccaatgagaaatcattttctctgtccaccagacaaggtatcagaatgaacctctgtttggtaatcctctctgattctagtctggtcaccatgaggagctggagggttaagggcctttttaaaaatgtagtctgtgcgccaggcacagtggctcacgcctgtaatcccagcactttgggaggccgaggcgggtagatcacttgaggtcaggagttcaagaccagcctgaccaacatgatgaaaccccatctctactaaaaatacaaaattagccgggcgtgatggcacacacctgtaatcccagctgctcgggaggctgaggcaggagaattgcttgaacccaggaggtggaggttgcagtgatccaaggtcacaccattgaattccagcgtggatgacaacagtgaaactccatctcaaaaaaaaaaaaaaaaaaaaaaaaaaatatatatatatatatatatatatatagatacacgtatatatatatatatatactggaataatgattctgcccaatgtgtaggtaacgatagaaactatggagtgtgtcaggggccttctgctcaacagtcctgccttcactgtccgtttcagggacccagggttttcttatatgatacagcaggaagtcatttatggcccaggctggctacattatcaccaaccctggatccaggaggtgcaggaaacatgtatgcaggcacattgctgcacttggctgggacggaagcagcaagaggcagatagacttccagagacgacctcgcctgtggcgggtcaacccacagacaccatgtgtggaagactgtgccctcctctgtaaacacagcattcacatcttctctgcaagggaatttgtgggagcaacccaggaactggcattgccatgcccctgacagacaaacccagctccccaggagtgtgtcatctaaatacgaagaggaaggggctttcactcttgtcctctcctgtccacactctctctgcggtatgcttgcaaggataaggatattagcaagtgtgcaagaaaaccacagacatctctacttgcaccctcatagagttctgagtagctcttaggccgaaaacatatccagtttctcaatggctgttggggacagaagacaggaagcatggggtgacccctgcccccacccccaaagctgctacccaggcacttaaacctaagccagccttcttttcctggggagggccattctgatcctacaggaagacttttctctcctcaaactcctggggccttgatattcccatcaaagcaagtatcggccatagacagagctatgcaagaaggcacacgtttgcaatttccacccttgaggaaggagtgaggttgtctctggccccagctgccttctttaccagcccctcctcctcccctgctctctcatggcctctctttgctgtctgattccaggccctgtgtcttcagtggcagtattataaggatggggtgattcgggatcatctcagaacatgtgaggttattcaaaatgtatctcacatggtgaaatacatcactgaagagtcagggaagttgtaaaagagcaaaaacaaactgttggtagggagctggccatcacctgtccccctaatttggttggagaatttgatccacgccttctggaagtctccacctcgaggcatcactgtgcctgtgctgagctttgtttatttatggaagatgagaggttgacattgaatgtgttcttgggcccccaggagtgtggggtaggtgtacaccaccactgatgcctcaatgccacagctctatgaaaagaggaagaaaaacacactttgggcaatagcctgtcatcatttgcaacttagatttagggaaggaggggaatctttgttttaaaggacatctcaggtgatttttcttcctcccaatgaaagaatccatcttaaacttgtttgtctttgttgaagaagaaaaatatgttgttaggaatgaactgaaaggggagtttttttctgtctctctcccattgcacattgatgggcttctgttgattccaggctgccatccgaaaggagctcaatgaattcaaaagcactgagatggaagttcatgaattgagtagacacttaacaaggttagtattaagggttttttttttcctttttttccctcaagttgcaatatttatctccaaataaagctctcccacttgtgggacatgagtgggttggagggtgccatgagagggaagatagtaggaaggcaggcatgcggttccactttaggttactgaaacgaggaagtggaacacagatggcccgggctaaaaccaactttctgcaaagtctgagtttcactcatttaaactaaaggtctgataagcaccagactaccaacgaccccaaggtgggtttttgtgaaaacttaggtcaaggagaaaagattgttgccaatttgcaaccagtcagcagaggccaaacctgaacaaaataccacatccacacgggacttccaaagtggaccacttctgttattccctgacattctccctgacagtccagcatcatgatgatatttgggaaaaccgaggcatggagtgattaagaggattatataaggttgcattgctagttagcaacagagccattgatttaattctgactttcttttggggggaacatttagagaaataggatatagcaagtatttagtctagagactcagagacacagattgggttctgcaccttgctgctggatccaggctgatggcaggaggtggaggccaccagggctgccccagatgaaactttcaaagccaggtgtgtgttcagtggtactcctgtggggatgacggtgggaagctcgcacctccctctcacggtcaagaacctccctgaagatgggagattggactgttgaatcctgcacctttggcagccccttggtcttgatgtaattgtttgtttccttaggtttcaccgaccttaacagtcgaattcctcttgagtgctatgctgtcttcaaaacataaatttataagaaccataagtgctggtatttattcacttccccattacgatgtaaatcttctgaactgccttttttttaaaaagaagaaaaatcaaggaaacacaatcaggattttatgtgtgaaaacgcaaaagtgatggctcggcggtccgagctgctggtcccacttctgacaccaaaatgcatcccaacccccggcagtgccaagggcaccagcagggccctgactgaagactgtctggcaggtggaacggtccttgtcctctccagccaggcccagcaggcactaccttcatgaagtctccagcaaacctcttcctcacaagtgtctgtcatctgagtccaaagaaagctgaaggggtgggtttgttttgggggtactgtgcaaagctaatgatctggttggacttctacacttggccaaatgtactggctccagacatgacatttggtttgggggccctttgaagttgatgccaagaaggagtgaacacttctcagttgcccctggcttttccctcctttcagccaccacccacacaatgaacaaaagggaagggcccatttctgggggagtctggctgcctcttggctacgaaggctggcactgagcacccatcctgctccctctgcctgagctgagctgcctttcaggaagctctggtttagaaggggaaagatgtcatatgctcagttcaaataatcaacccaactgtgtccagagtgtccagtgtcatgagtgacccacgcacacacacagccattgctaaggtactcctgtgctgtttataagtctgagtgggaggaccctattgaatcctgtggggtcagaaactgcttggctgacatttattttctctgtgcgccttgaagctgattatatggcttgggagttcttagcttctgtgtataggaccagtgcatgcaggccagaaaccactcctgtaggactggctttccagccactgagggacttggaaccactccatggccttctcttttttttttttttttttttttttttttttttttttgcactgaagagtttctgtgaaggagccccagagttgggcatgtgccagaatcaggccaacaccagccacacctgtccacagtgccccttcctgctccagttgatccagagagctcctccctctaccctcatgatgccagggagcgtgactgtgggtgtgtctctgactgggacacccaggatagggtgtgcgatgaggccaggaccctcctaaaccctaacagcatcctaacgaggcccattgcagctttcgatttccttcataacagagctcgcaggccctcagttgcagagctctctcaccttctggagtgactccatcgttactccagtctttctaggtggtggaactctccaccacacatgccatttagaaagacgccagcttggcctttccaaaaagttaaccagtcgtctccccaccacaaaccctgtgggagcaggttactcttaggatgcacacccgtcaacgaggccattgcatttttttgcaggcatgaacggctcccatctaggcactaacccaggagccaaacaactgctggggagagttcagggcagctctttgggcggtgcctccagctgcagctttgccttgccacctggagccagcacgcctctgcccgacccaaggaggatgccatcactagatcctattttttttttttttttttaactcttgaatctgaatagttcctgccgtggggagaggtattgttcagggaaaatgtgatcgggattttagtgtggctgtaaacacagtcttcccgaaaggcttactgacgtttgaatgtgcaaatggtatgacgaaagatgtagggctctttcgttgaacttctctacggcgggcgggcggacacgtgttccaggtggacttgcctgccggccaggctttgagtctgaacttcctctaactgcagctgggctcctggcacacgcggtgccctggcatgatggtcctccctggccaggagcgagtcctaaggaaattcattccattgaccggactcctcccatgataggcccatggcttctctgctggccttagttcttggcccttcagattccctggggatataaggcccaagcggatctccctgcagccagccagcagacagcccagggtttccgcccaaagtgccctcatgttgcagtccactttgtgcatggaagatattgaacacaatttccactgctcttcctgcagggcctcctttccagcagtcacttgctcagactgaggggtgcacctcccctgccattgacaggtcctgcgccttcaggatgggctatttcaagcccgttttaagtggctcttacacaggctcagcaacctctgtggcctgcaggatgggccttctgctgtctctttcctttcttaaaaccttaaggtctttctagagacctattcaattttctttttttttttttttcactacaatgtcatgacaactgcagcaatttgtgttactttccaagatgacaatttgacattaattaagggaaaaaataaaaaggtgagctagatgacttaaaatgcatctcttttttgaaaaagctgtagctggcaagtcaaagtttattttatgtgtgtaaattcccagttgagcatttttttcatttggattagcgtgagaggaaaaatgtgaaatgtctcaaatcaaatgcttccttctaaagattagacattgcccaaccctgcccccgcccccaatcaatcagtgacagaagagaccgccatcagccaactagctttttttaaatggctgatatattcatctctaaaggccctcaaagcactgtaaaacttttaaaactttagcctttatgtcagattagagaaaccaaacaatgtgacggtacatgtgatgaaaagctctgggtttatttttctcccgcttatgaacatgtatttttatttgccgaatgaaaatcgtggtgtgttgctttgatgaatggaatttcaggctctccctgtgcacagccggtgggcaaaggtcaccttaaatgactttttctccctatctgtctgttaatccccagaccggttgcattttccagttgcttcctgggtgtctgtacatagtttgtctttgtataggagtgagtgtggtgaccgtcaatcccctaatctcccaggttctaatttaacagatgatggctgtatgaggaaaacgatgtaaatagagaatacaaattaaactggatctctgtggcctaggttttgtacatacagaaactgcatggtatttaaattattgtttgtctctgatgatgtatgcagtttctttaaaaacaaaccaaaaaaaagtaaaaaaaaaaaaaaaaaaattcttgactcttgtgtgttttgttatcaaccagcagcagaaaccaccaaaaatgctttgactgggaaagggaggttgcaggaatgggagaggtcagctcatctgcaaaatacatagtgagagtgagtggacatacgggacaaccgcatgtctcctctggtattattgggggaaggaagtattgtagcacatacattaactttctagaagacttttgtgtactaggatttttttcctcaacttttttttttttttgagactgagtcttgctccgtcgccaggctggagtgcagtggcgcaatcctggctcactgcaacctccgcctcctgggttcaagagattctcctgcctcagcctcccaagtagctggtattacaggcacgcgccaccatgcctggctaatttttgtatttttagtagagatggggtttcaccatgtttgtcaggatggtcttggtcttgacctcattatccgcccacctcagcctcccaaagtgctgggatcacaggcgtgagccactgcgtccggccttcctcaacatttttataagaatatctaaaatgtcaactgtccttttaacgatctgggaaggctggagatcttggctcactgcaacctccgcctccctggttcaagtgattctactgcctcagcctcccgggtagctgtgactagaggtgtgcaccaccacacctggctattttttttttttttttttttgcattttatttttagtagaaacagggtttcaccatgttggccaggctggtctcaaactcctggcctcaggcgatccaccctcctcggcctcccaaaatgctgagattacaggtgtgagccaccgtgcctggcctctatctccgttcttgagaagcctgagtatttgatgtataaagcaaagaactgcattgcataaccttctggttactacttgtctttgaaggctttcagcggaagcagaggggctgcattttaggtgggggacgttgctgggtagcatatccttcgtccagcagcgtagaaaggctgttctggtaaagggcaacctcgtgccgtgctgctcaaaccaccttgcctaggaatcacctgggggtctcgttaacatgcaagtactgagccagcaggtctgaacagggcctgggagtctgcatttctaataagctctcagggcctgctgatgctgctggtccaggaatcccacttctgagtctcaaaggctgggagaagaatccccaaagggagccacctctcctttgcctgagatctctgagtgcccccatgtactgctcatatctttgctgggaagcagcagtgaagccctcctggatgttcaggtcctgcagtatttgcatcagagtatctgtgcccagagctctcacctgtgcagccagggggcccctggagcagcagtggctatgacagaaggggcaagtactttacaaaaaggttttcatatttcaaaaatccatcagtttctctttctttctgtccttgcagagctttttttttttttttttgagacacagtcttgctctgtctcctaggctggagtgccgtggaatgatctcagctcactgcaacctctgcctcctgggttcaagcgattctcctgcctcagcctcttgagcagctgagattacaggtgcccaccaccacgcctggctaacttttgtattttagtagagagagggtttcaccatgttggtcaggcaggtcttgaactcctgacctcgtgatctgcccgcctcggtctcccaatgtgctaggattacaggcgtgagccactgcgcccggccgctctctgacttttgataaattaatctgagaacttgattgcaagttttagggcagtgaaaggacaagaaagaaacagctttgataaaactcctagcagactgcctggcaagagggaaggaaactggccataatcctgctacggagggagccctttcccaaggaaacaaaggttgtggctacacattctctctctgcaggaaggggcagcctggtgtgtctatcgcatctgtttatctgggcctcaatttcctcatatggaaaacagagacagtgaattagatgttcctaatattctttggagcatcaacttgtccatgatttgggaatactggcatttttaaaacattcaacttagttattaagaaagagttaactttaaagcaagtccggctgaggcctgtctctaacagtttagattcctctccttcaggtcaccacaaatctgccatctgtccctgcagtccctccctgccatgcactgccctcctggagagctgggtggccctgggacctaccctcccaagtgccttcatggggcctcatcccgaagccgccatcaatcaggttatctgacatccttctgcctctccctgcccttgggcaaaacaccctggagtgctcttgggtcttgatgggtgatgtctacgacacaatgctttgtcccctacagcatcgcaggtttgagggtgctctgcggatgtagctacttaacctgttaagccaaaggacacgtttgacttgtttgactcggcaaacgctccctggctcactctccacaggtcctaagtgatctcctccacgggtgtggcttcagatgactccctgtctatggctgtagctcagatctgtcccaagcccctggcccaggttttctaaaaagcagcagggtatcgtagagtgtcctgcaacttggatggagctagaggccattattctaagtgaagcaacacaggagtggaaaaccaagtatcgtatgttctcactcataagtgggagctaagctatgaggacacaaaggcctaaaaatgagataatggactttggggactcagaagggggagggtgggaggagggtaggaatgaaaaattacacattaggtacaatgtacactactcaggtgatgggagcactaacatctcagaataaactactatatattttatccatgtaacaaaaagtcacttgtgaggccggacacagtggctcacacctgtaatcccaacactttgggaggccgaggcaggtggctcacctgaggtcaggagttcgagaccagcttcgccaacatggtgaaaccccatctctactaaaaatagaaaaaattagctgtgtgtggtggtgggtgcctgtaatcccagctacttgggaggctgaggcaggagaatcacttgaacccgggagggagaggttacagtgagctgagatcgtgccactgcactccagcctgggcaacaagagcaaaactctgtctccaaaaaataataaaaagccacttgtaccccaaaagctattgaaacataaataaataataaaataaaatacagatatactaatttttgaaaaaggttctcccacctggatgacggcagccatgatctttctgcctgtggcctcagcatccagtcctgccatgagagtcatgtctcccaactcagatgggctcaccccaccctccctcttggtacctgcctccactgtcttacccatcaagccccactctgcagtgtggcatccgtagtgacagtgtggcccttgctcacttccgccagcctcacctcctgtcccctgctacatcactctgctcaggcttcccaagcagacccttctggtgcgtgtgacctgggagtcctgtgagggatgctattgatgtggccatgttgtggtgaccacctcagggacaatcagggtttaacaagggccctcgggcactgagcaactaagctttcctgaaaggagtccaagagaggtctcatgtaggcaaccttggaactcaatgagaagcatacaaagaaaaaaaaagtatgaacaaatagctgtctcttctgacacctggcaggtggcggccctgatttctaactctggctacctggtcacttgatccctaccaacagcaccactaacagctcccacacagtaaacacttaccgtaccccaggcactctgttaggccatcttcatgcaccattttctttaacccttacgacaccttggtcaccgatgaggaaactcaggtccccaaacaacaacgtgggcaaagtcacacagatggtaagtggcggaggggcttccaaacccaggtctgcctgactctaaggcaatgcccttaacctccctgctacgctgacgtgtcgtggctttccctctaccttcttgagttcacacttcctcagcatccatccagttatcccatttgcctgtcttgagtgattacatagttttctgacactgaggatcacagacggaaagatcatggactgcctccaagccccggcttccagctcctccctctcacctctcatgcacaactttgtctgtgattaagctgagtctcccgcttctccactccgtggggacctcccacaagcatttgacagtcagccaacatttatgccttcctgcaagggaagcagaagtcacgaatgaggcacttgtacagtgtgggtcctacctagagctgttgcaaaggcaggaagagaagggcatgctacctaatgagagagaagaacaccagacacttcatcgtgtgtgagcgtccagtcccttacctagaggctattttctgggggggaaaagggttctgctcctaatcaaataatgctctccacatttcataatagggagccatgatcatccactatttccatgggcaacactgcagaggaaggcaaagggctctcattaattaaactaatgaattcatctgcaggagacaggaagagtaaaccacggaaacagaattgactaattcttcttccgttaagatgcatctaccctgagccagaattccagaactggttcccctcctcatccatgatgaagacgctgcggctcatgtggtcacaaaggcttggtgtttcctatgtggagataccattgctgttctacctttaatcaacaaaacaaaacaaaacaaaaacgagaaagagaaatggtagagggagggaggaaaatgctgtctgttccttaatcaccaatcaccaacctggagtggtcactgacaccttgtccagtgtggcaggggggtccctggggtccatggtcctggggtccattcagagcccccacccagaagaggacaagccagtcttcagctacacaggtaaaaaaacacttcacacatggattgaacttcttatctcagacagtcctgaccagggacggcatcagagtaaaggctttggtctcacgcagcaaccctgtggccagtccccgcagtgtggcaggcctgccactgtgcgaccgaggccgtcatgcatgaagcacatctggggctttatggctcaacacctgagcctcctggaaggccttggccgcctcactgaagccccagcgtaccggctctgcaaggccctggggttaaaatagcaaaaatgccatctggcaagaggctggctttgttcagactgtgtgctgcgttgtcgctggggtggtggggacattttccaagccaccattagaatatgagctgtcacctgggcgagccccactcccccatgcccccagcccgctcgtcagcatccacgcaatcatggcaggagcccctgtggcagctgagccaccttgggttttcctcaattccatctcactgacttggtgatgacagccccaaagcaggcaggacaaatcccctctttcttcctagaaaagtacctgaaataacacgctcattgttagactccaggagttggtgctgaggaagggtccttggggctgggacacggagaacagccaccggtcactgtagacccttttgtcctggctgcctttcccctctattggcacatgttccttttccatcaaaaatttagttacaattatttttttaaaataagaagaccagaaagaacacacagggctgactgccttttgtaggacaaaactcgaacagggaaatttaacttgcgtgtaacatgcacacccagacgaccttatttcaatcatacccaattttaaaatccaggaaccggccacagtaaggaaaggcaggcatgtttcaggctgtccagcagctgggcagaaaaacggagacccactgggccaaacagtgagaggctccaattgagccatcctagttcaggtctccctagtgacccccctctgtgcggggaggtaagtgcgtctcttgatatttttagttcactgtaaagacatggtttttgccctccaggaatcagctagctatgcatgagcggaaaccctgcaggtgccgaacgtaactgattggagtggggaggaggggaaggacaaagagtgacagcttcaggtttggagagtagttgagtgatattagaagcaaaaagcatctctgatttggacagcagaggtgtgcacagttctgctgtggtttcaatcttactataggccccagtcaacaggacagcacaaatgctctttttttgaccggacattcggctggctcagagcaagtagcggggtagagtcacttagatttcagcagcaaagctgtgcggggaggcaagatgctgcctgggctgcctccccggcctcagcatcatgcctaggtggaggaagacgccaaggcaggtttcttgagcccagtggaaagctgcttgtgctgcccccagctccctcccaacaaaaccaaaggccattcatgctaaaagggtcacttagtccaaaccttctggtcacaacagaggaaggtgctctgctgccctcagcacaccaaggggggacacccctaaagaaagcactagaaggtggggtgcagtggctcatgcctgtaatctcagcattttgggaggccgaggtgggtgaatctcttgaacccaggagttcgagaccagcctgggcaacatgacgaaaccccatctctacaaaaaatgcaaaaaactagctgggcatgtgtctgtagtcccagctaccagctaccggggaagctgaggtgggaggatcacctgagcccaggagctcgaggctgcagtgagctgtgattacaccattgcactccagcctgggtgacacagtgagaccctatctcaaaaagaatttttttaaagcaagcaaggactagaagctgcactgctgccagcacccaagcttcaccccacggggcccctccttgctgcattagcactggccactgcatcacatccccacaccatcatcctgagacacccctgcccccagcaccagcggaatgagttttgcaccccagcactgtgctggtcactttcatctctcatccccgttttacagatgaaggggctgaggccaagaaaaaacagtcacacagttagtagcagagatgagcaaagaactctcaatccagttcccttgaccctataccactagtgaatcccagaaagggcagtcagaaagatgatggttttagacatagatttaaacccatatctgccttgctaatctgcatctgctctggtggtgtcagttagcattaggtctaacagtcttcacataaccaaaaactcaaataatagtggctgaaacaaatcgggattttttaaaatgtaaaggcagtctggaatgaagcagaaaagagcgtgtgtggtagtgacaccatcaatgtgtagctctatttttcggccccaccatccttatcatgtggcttccattcttgatgttgccccacattccaagatagctgctgaagctcctgccattatggatgtgttccacgcagaaagtaagaggaaataccaggaagaggaaatttacctgccagctgaataaattctctttaaaaaccttttctggaagtcctacctaatgactttaccttccatcttattggccattcctttcagcaagagggcctggggaataaggtatgttaacacactcctgcctcaaataaaattggggtgtcgttagtaaggaagagagaggatgaagaatgagtaggcaactataaggtagttggtagttggtgagctgccacagagctgtccttggtaatgagctgatttgtaatacggttagagtgacaccacttcctagcatggaaagggaacaatttgtggaaaacattcacatttcagtatcaagattttattccaggtttgataaactattccagtgatttataaactttagcaatagcttagaaacgaggtcagactagcttaaaaatgagaaaaaggcacaggcaagtggcatatttctttcttttgcaatcagcattaaacctgtcatcattaggtgaaatctacattccctgggcccttgctactcaaactgtggtccccctggacaagcagcatcagcatcatcacggaacttgttagaaatgcagaaagccagacccaccccagacctacagacagaatctgcagttcaccaagaccccaggggctcccaaggcacattcaagtttaagaagccctgttccaacgcaatgccctaaagagtctgcaatgggcctccactctcctaaaaacctcttctcaggaagcagtgtgctctgggactcttagtctttggtgagactctgcatcacagcgccactctctgaggagaatgcacattaaaacacttgtagaactataatacctaacatttaccaacttctgtgccagacactggtctaaggatttcacgtctgtttctgtagctcatccttctaaccactctgtgaagtgggagctcgtactctcatcccctcccctggggtacaaataaggacatggtgctgagttacccagccagccagccagcaataggtccaagcagatgctgcctctctcgaatgttttgcccagatggagagattttaaggctcagagaaagatgggtcagtgtttccgaatgagggagcagcttggtgaaatacactctggacaggcagcggggatgactgggttccagagcttgctcagctactgggaccttgtataaataactcactagaccacctggaacctcacttttcttatctgtgtatggagtgatctgcaagctcccctccagctctgacgtccctcgggtccggacgtgccttccgtatgatcggaaaatcagtcagccttagcagctgcctcccctaactggctttatttaggttcactcaactgccacccagcctggccacagcccaacttggtctggacacccagatgttggacaccctgcagggaaactatacaccctcctgagcaatcagagacaaataaacacagctgctgccagcgaagccccccagttgacccaggtggaggggaaggagctgggcaaagtcgactttctgtagactttcggactgaattcgacttggtatgaaagttcgcaaagggagcacctggccatgtgagtcagttcaccaaggctgctggtgtgatattacccctctgcccaccctcgtcggaaagggctggctgcccacctgcctggctggcagaaaccagaaagaagtggtgcaggaaaagtcactgagacttagtcgaggtggaaggcttcttgttaccccctggcccttctgcagggcatttatctggtcaacagatctaagtggagcggagagtctttgagagtctcttcccagttcacagtggacctgtccaccaggccccttgctcaccactccctgcactgcagtagacacaagggaggctcctggtggccctgcgtctgctgtgggatgcctccacccactaggctctacatgattggcccacaggcagccccaagcccaggccagaccacagcctctttcccatggatttaggaattgcgtcacgaaactctgtctccagaggctggacctgtaatgtatacatttagcgtcttagggtggggcatcttctaccagagtgatccagactgcagagacacagactctagacagagcccacacactgtgtggatcatagataagaggacgagagggtccagggtctctttagtcccatcccagactccaagccctccctctttaggttctcagcctcacccctgcatcctataataaaatctcctttaagcaagcgtgcttcagaacaactctattacttgtcaatggaggcgtcttaatgctgaaccaggccttcccatattcaacaaatattcatgaagagcccacgtgggctaggagatgtgcttgacactgggggaacgaaaaaaagaataagtcattaccactaacctcaaagaggtcacataaatctgggacgtaaacagatcattctaaaccaatgtattagtctcaatgtttgtcttcccctaaaatgtgtgtgctgaaatcctagcccccagggtgatggtatttggaggtggggcctttggaaggtggtgaggtcttggggtggttcctcatgcatgggattaggacgcttgtaacgggctgaaagagcagagttcattccttccaccaggacacagcaggaaggcaccatctatgaaccacacagagggccctcgccagacactgaatctgccagtgcctcgggtgtgctaaaggcagcccctggcttcaagaatcttgcatcttagagggaaaccacatggaacacttaataaaagttcaagacaaccgaacaagagacttccaaacaattattgctaaatgagtggtccctgaaatgttacagaagctcagagttaggaaaatgcactttgagcttggcagttaacaaattttcagagaaggcagagctgagttaggcctccaagcatacggtagattcaaacagagacagtgcctagccacactcttgcaaatgatgctcttgaaaatattaaatatccagagttccatgcttctaaaagtgctttcacagccaactcatgtgatgctcacaagcacgctggggagggagggatgtcacagaatcactgtttgatgatggggaaaccaagacacagactgagtgattggcttggtttgcaaaactagtgagtggggcagatgctcatgccccctgcccggtccaaggctcttcctgtcacctcttccattactaagtgaaggggacacagaatcacacatctcacagcaattctacccttcctctggagcttctggacagactcagtccaccttctccctggtgtggcagcacaggagttgagagtttctactaaagatgtctggaacaaaacatctatctgttaaatatgtcttccctgcatgcttgtacactccgagagggcagataccatgtcttgttcagcaattaagctcagtacctggcccataattaagactgtattcacatatattttgtgattgaatgaaaacaaataaaaagacaaatgaaccaaacatatcggtcagaggagggagaaacgggaggtgggaatgcaggcccactgcggtatagcgtgcagccacctgatgtttaggagtgaatcttccaaagcttctcctctttgctgcccccctctcaaatcttcttagtattatgtccagagggcaggcagaagcagggaaaagagagatgctaaaatgtccagcaagcaccagcttgctacttattaagactctaggaaaggatgatggagaagaccaggaagtgactctgtgataaagccagtgcttagcgtgagctctggcagtcccgagtgcctgccatgtaagttcctggtaaactgcaaaggaaaacctcagtattaggtatgagttggagatgtgaaccttaagcgcttgctatgacattcaatttggagttgtgcttaggatgagcttctaggattcttgtgtgtccttctctgatgacattctccaactccctttgtcattgtcctggagtaaaatcagcccctgggagggggctccccttatggggagttatcacctcatctagaaactgtccactcactttttaacctccccaaggcaaggctgacagagggaccaaagtggaaagggcgactggtcgggaaagccatgaaaggccagcacccccaccgtggtcccccagaaatcactaccaccctctgttctccacaccgccatccatcacccctccctcctactcaaactggtgccagctctggaggaacatcagctgatctaggagccacggcttgtgccaagagccacggacagtttcatttggcacacagtctcaaggagaaacggctctttgttttcaccaacagaggagatgccaccaactcctgctccccaaattcccacactcctttccctctctgtcaagggcagaggaaagcaccttctggcccttctagacccaaaacacccagctaaagacaaaggctgctgaccttatgtgacccgggcagattcactgtccacaccccacacccctcaccaggctccccaaaggctgccttggctggagaacttgggatgtcactctgctgcttacggtcacagagctcgagcaggcgctgtcacttgggccatgtgagccagtgactcattttaggatctggtcctgggcatctaagctctttgcttaccctcctcatccccactggcttccctccaggttcttcattttcagacagaaaacaccaaaaccttgagtcaccatagggacgtgataaccacatgacaggaaacttatgcaattcaagacagggcaagtgcctgtcatacccagagctacagtgcaagaaggtcctcggagctccttcagcgcatcatatgatttcagtgttgcctcataattttcaggcgaactttccattaacaaagaaagtgcttcattctcatgaaccctgacctcatttcctgaaacagccttgacacacaagcctgtgtacacacaatcctctacacaattatacctcgacgcaatccatccattcgatttgtcagcaggccaaagccacacccccaacacacacacactctccaaccttcctcggccttcctttctcctggccaagaggactgagatcttctctcatctgtgtttaaggcaaatctctagacgggaaagagcagaaactaaatttgatcatgttaaattccagctttccaagggcgaggaagaatctcacattttagccgcaatagtctgtgacaggaaccgtgggttgtaatatatgaaggaaaaattctgcagtatcctgacaaaatgttttgaagaaaaggcatatggatgtatttttatcaggaactgcgctcctcacccaagacagcaggcacaaacattttcaaaacactcagctctcagcaaagtgaaattctgctatgaagcgaaactggatgctcatcctctccatccaccactttctcaggatgggccttaaaaaaatcattccgccaatcagtgttttaataaaaactctcagattgactaacttcaagaaaaaatcgccgccccacaccctacagccagaaaggttttaccaaactgggtttgacagaatatacttgcagaatatttatttttagatctctcagcagtacagtaagagtctttcgtttcagatcagctggcctccagccaaagcagcgaagtcagaggaacttcagcccctaagccttcctgctccctaagagtaccagcgctcctgcctggctccggcataaatggttggcaataagtcattttttattaaaattttaactctaggcagcaattttgctttaaaaggtttttctttggagtgcatttttattttaaaaaattaaatactcttggatatgttagtattcagaagcagcagatttcaacagctcacactttctctgaactttttttcaacagatatttcacacactaaggagggcctgaattctcagaattgtacctctataagttcatagctgccctcgtcttttagggggtgggtggaaaatccaactcaccactcaggctcttgcaggtctgaaggctaaaccggtgtgaaacaaagggtcccctttcactcactactcccaaagccgggaactatccagtgaagagtggccatgccatttacgtggcacaaggtggcccaggggtgatgagctgttcaccttcaccggccatttctctcactgctttagtgcgtggcacagtgcaccctaacatcccacatttaacaccccatcaagaaaaatgtgagtgcagcaaaatatccaacaagtacttgctcctaggagcaattcaaacacattttgttcaataatggtttcattccaactggcccaaagagaaaaaagagtaaggaattgtttaaagcctgtttagcaagatgaagcctcagaaggcagttggcttggatttaaacacgtattgcatcaacaaaagccaaatctgaggtgtcaacaaaaggaagtcactcttattctagaaacagaccttgaaagtaactagcttggtgctaattagagacaggcagggcaggcttagttatgcactgctggttaacacacccactcaccctgactaaaccgctttaaaatcagggagctattttctaacaacccttttgaaatgctattcagagatgaactttacatttctatgtaactgcaagatgctgctcgccaacacagcaacaccaggcatttcaattaaataattttattgggggaaaaaaaccactttgagcaccaaagcaagaaaagtgtattattcaatcagtttcccagatc

SEQ ID NO: 83 - DNA, 5203 bp, Homo sapiens
cagaaaaatcaccaaagtcacctaattcagtgaaagcagaaaaagcatccagttatcagatgaagtcagaaaaagtaccaagttcaccagcagaagcagaaaagggacccagtttactgttgaaagacatgagacagaagacagaattacaacagattggaaaaaaaattccaagctcctttacttctgtggacaaagtgaatattgaagctgtagggggagaaaaatgtgctctgcaaaactcaccacgatctcagaagcaacagacatgtacagataatactggtgattctgatgatagtgcttcaggaattgaagacgtatcggacgatttaagtaaaatgaagaatgatgaatctaataaagaaaattcttcagagatggactacttagaaaatgccactgtgatagatgaatctgcattgacacctgagcagaggctggggttgaaacaagcagaagaacgcttagaaagagatcacatctttcgacttgaaaaacgatcaccagaatataccaattgtcggtatctatgcaaactttgcttaattcacattgaaaatatccagggggctcataaacatataaaggagaaacgacataagaaaaatattttggaaaaacaagaagaaagtgagcttcgttctctgccacctccttcccctgcccacttggctgctttaagtgttgcagtcattgaattagcaaaagaacatggaataacagatgatgacctcagagtccgtcaggaaattgtggaggaaatgtcaaaggttataacgacatttttaccagaatgttcacttaggttgtatggctcatctctgactagatttgctctgaaaagtagtgatgttaatatagatataaaatttcctcccaagatgaatcatccagatcttctgataaaagtacttgggattttaaagaaaaatgtattatatgtagatgtggaatctgattttcacgctaaagttcctgttgtggtgtgcagagatcgaaaaagtggtttactttgtagagtgagtgcaggaaacgatatggcatgtctcactactgatttacttactgcccttggcaaaatagaacctgtctttattcccttggtgttagcctttcgctactgggctaagttgtgctatattgactcccaaactgatggtggaatcccttcttactgttttgctttaatggtgatgttttttctacaacagagaaaaccccctcttcttccttgcttacttggaagttggattgaaggctttgacccaaaaagaatggatgactttcagctgaagggcatagtagaagagaagtttgtgaagtgggaatgtaattcaagtagtgcaactgagaaaaactcaattgctgaggaaaacaaagctaaggcagaccaaccaaaagatgataccaagaagacagaaacagacaaccaaagtaatgccatgaaggaaaaacatggcaaatctcctttagcattggaaacaccaaatcgggtatccttgggacagttatggttagagctgcttaaattctacacactggattttgctttggaggaatatgtcatatgtgtacggatacaagatattttaacaagagaaaataaaaactggcctaaaaggcgaatagccattgaagatccattttcagtcaagaggaatgttgcacggagcttaaacagccagctggtttacgaatatgttgtggagagatttagggcagcttatcggtattttgcctgtcctcagacgaagggtggaaataagtctacagtggatttcaagaaaagagagaaggggaaaataagcaataagaaaccagtcaagtcgaacaatatggcaaccaatggttgtattctgcttggggaaaccacagaaaaaataaatgcagaaagagagcaacctgttcaatgtgatgaaatggactgtacatcacagagatgtattattgacaacaacaatttgttggtaaatgaactagattttgctgaccacggacaggactcttcatctctttctaccagcaaaagcagtgaaatagagccaaaattagataagaaacaagatgatttagcgccttcagaaacttgtttaaaaaaagagctcagccaatgtaattgcattgatttgtctaagtcgcctgacccagataaatctactggaacagactgcaggtcaaatttagaaacagagagttcacatcagagtgtgtgcaccgacacatctgctacctcttgcaactgcaaagctacagaagatgcttctgaccttaatgatgatgataacctccccacccaggaattatattatgtgtttgataagtttattttaacctctggcaagccaccaacgatagtatgcagcatctgcaaaaaggatggccattcaaagaatgattgcccagaggattttaggaaaattgatttaaaacctctaccaccaatgacaaaccgatttcgggaaatacttgatttagtatgtaaaagatgttttgatgagttatcaccaccttgttctgaacaacacaacagggagcaaattttaattggcttggaaaagtttattcaaaaagaatatgatgaaaaggcaaggttgtgcttatttggctcttctaagaatggatttggatttcgtgatagtgatctggatatttgtatgaccctggaaggccatgaaaatgcagagaaattaaattgtaaggaaataattgaaaatttggcaaaaattcttaagagacatccaggtttaagaaacattttgcctataactactgccaaagtgcctatagtaaaatttgaacacaggcgaagtgggttagaaggcgatatcagtttatataatacgttggctcaacataacacaagaatgctagctacttatgcagctattgatcctagagtgcagtatttgggatatactatgaaagtgtttgctaagcgatgtgacattggggatgcttccaggggaagtttatcttcatatgcatatatccttatggtgctgtactttctgcagcagagaaagccacctgttatcccagttctacaagagatctttgatggaaaacagattccacagagaatggttgatggatggaatgctttcttctttgataaaacagaagaactgaaaaagcgtttaccttcacttggaaagaacacagaatcattaggggagctttggctgggactgcttcgtttctatactgaagagtttgatttcaaggaatatgtaattagcattcggcagaaaaagctgttgacaacttttgagaagcagtggacttccaagtgcattgcaattgaagacccttttgacttgaatcataaccttggtgctggagtttccagaaaaatgaccaatttcatcatgaaagcatttatcaatggaaggaaactttttggtacccctttttatccactcattggcagagaagctgagtacttctttgattccagagtattaacagatggagaactggctcccaatgatagatgttgccgtgtgtgtggaaaaataggccactacatgaaagactgccctaaaaggaaaagtttactgtttagactaaagaagaaagacagtgaagaagagaaggaagggaatgaagaagagaaagattcccgagatgttcttgacccccgagacctccacgatactcgagactttagagacccgagagacctcagatgttttatatgtggagatgctggacatgtacgaagggagtgcccagaggtcaagctggcccgtcagaggaatagcagtgtggcagcagcccagctggtccgcaaccttgtaaatgctcaacaggtggctggttcagctcagcaacagggtgatcagtccataaggactagacagtcatcagaatgttctgaatcaccatcttattctcctcagcctcagccatttccacagaactcttcccagtcagctgctattactcagccttcatctcagccaggatcccaacctaagcttggcccacctcagcagggagcccaacctccccatcaggtccagatgccactgtataactttccccagtcaccaccagctcagtattctcccatgcacaatatgggattgttgccaatgcaccctctccagatccctgccccgtcctggcccatccatggcccagtgatccactctgcaccaggcagtgcccccagcaatattggcctaaatgatcccagcatcatctttgcacagcctgctgccagacctgtggcaatccctaacacgtctcacgatggacactggccccgtactgtggctccaaattccctggtaaacagtggtgcagtggggaattcagagccaggctttcgaggactgactcctccaattccttgggaacatgcaccgcgtccccatttcccccttgtcccagcttcgtggccttatggtttgcatcaaaacttcatgcatcagggaaatgcccgattccagcccaacaaacctttctatactcaagacagatgtgccacccgtcggtgtagagagcgttgtccccacccaccaagaggaaacgtgtcggagtaatgcgagtccattttctttcagctggtctaccgatgcacagcaaccagccaatcctgctgtctcaagggtatccgtacctcaatgtcagttacattcagcagaaaaagtgacatttaatggaaagcaaaacaaatcaggtcctgatttaaaattttaacacgtttagatagcttatttaaattctaagactgtttttacagactgtattatttgtatataaatatgaactatagtttttactagtatcaccaaattgagtgatacaaatttcatctattttattaccctatttttaagggaattttatgttttgtttaaccttgatgaattgtataaagagagaatttaaaaaattacattctttattttctattagctgtattcatactttggttgcttcagactttatatattgttcttaaaagttaggaaagaatttcatgtgttttaaattgtcacttctattctttacagaaccttgtagtgccaaaaactttttaaaaggtaaaaaaataaaataaaattacaacatgaagattcagattttttttcttttccatacttgtatattgaacattcaaacttgaatggaaagttgattttgtctgtatttgaagtacttctattttaagttaataaatctttttgac

SEQ ID NO: 84 - DNA, 5507 bp, Homo sapiens
ggccaggttatcaggggcttcactgtgaaacctgcaaagagggcttttacctaaattacacttctgggctctgtcagccatgtgactgtagtccacatggagctctcagcataccgtgcaacagttctgggaaatgccagtgcaaagtgggtgtcattggctctatatgtgaccgatgccaagatggatattatggctttagtaagaatggctgcttgccctgccaatgcaataatcggtctgccagttgcgatgccctcacaggtgcttgtttaaactgccaggaaaatagcaaaggaaatcactgtgaagaatgtaaagaaggattttatcagagtcctgatgccactaaagaatgtcttcgctgcccttgttcagcagtgacatctacaggcagctgctctataaaatcgagtgaattggaacctgaatgtgaccagtgtaaagatggttacataggcccgaactgcaataaatgtgaaaatggctattacaattttgacagcatctgtagaaagtgccaatgtcacggccatgtggacccagttaaaactccaaagatttgtaagcccgagagtggtgagtgcatcaactgcctccataacaccactgggttttggtgtgagaactgcctagaaggttatgttcacgacctcgagggaaattgcatcaagaaagaagttattcttccaacacctgaaggttctaccattttggtttccaatgcctctttgaccacatcagtgcccacccctgttataaatagtacttttacccctacaaccctgcagactatcttttcagtaagcacttctgaaaacagcacttcagctttagctgatgtatcatggacccaatttaacatcatcattttgacagtcatcatcattgttgtggtgctgctaatgggatttgtgggggctgtatatatgtaccgcgagtaccaaaaccggaaactcaatgcccccttttggaccatcgagctgaaagaagacaatatcagtttcagcagctaccatgacagcattcccaatgcagatgtttcgggattgttggaagatgatggcaatgaagtggctcccaatgggcagctgaccctgacgacgcccatacataactacaaagcctaaggagctagaactgttctgaattgttaaaccacagtgcttgctaagacagagtcagcccctgggccagacaaagcctggctagagtttgctgagaaagcaaaggcaaatagtgcatctgaaattttcaggtacaaatttgtaatgcgcttagcctatctattgctcttagttttcccatgaagatctgaagcgttcactgtcattaggacttgaagtaaagtatatttttgtaccaaaccacatgggagtatggaaaggctgaaccccatagtgcagcccaaaaccactttgacctccagatagactcctggggaagcattcaccaagccagtggtaacaagatgatgaatgtggagggggaaaagactgctggaagacttcatctccattcctgaaacattttttttaaaacagtgtcagggattatattcgttttactatacaaaaggacatcattgaggaaaagcttgtttctaggctgtatcacagtaaataatcttgattgtttctagaacaggggtagaaaagtcccaagatcttcagaagggcttggttttttcctcccaggattcttgctcagtgatgagttgaaagcacaggataagcttctaagggaggaaggcagcattggggagcaggaggctgatggtcctcctcagggtctcagtgtaaatgataaattgtctaaaaataaggaatattcctgcctctagagaaataaggtgtacatagttaatgtagcatatctggtcgacgttgtatttgtatctatttgtaaaaaaaaaatcatgtcatattttatcatctggaatttatttgtacagcagttaatggtgttgtaaaaagaaaaatatggggattgcttaaaatactgtaaaatagatggcaatattgctagagctgggactctggtgagcatccgtcatttttagtccttcttgaggacattgctgaaatttataagaggtcgaatgtttctttctttcctttctcagtctaaaagtagagttatatgctctttgacttactatgattcaagcaatagattttgaagtcagtaatcgttaagctgggacataggatgcattctccaaaaacattaatctaattagacattagccaccctatatattttacatagattaatataaaacatatcctcattaaaaaatgtttttcttgaatgtaaaagatagtcttccaaaggatagaaatattttagttccaagagaaaagccatcatattacttgggatctgtagttttcatgcctatgaaatatttataatcctccctcaccccaaataaaaaatctcctacatgtgaacatagcctgtcactcatttgccatgaggtatgtgccatctccctgcagtgctatagttctcccattgtcttcctgtctggttaatgagcagctttgtagatgggtgtgtctagttagttcttgctttttgatggagttttttcctagaggccaactactgttgctctcgtttattatgatattgacattttgggttaagcaaggtgggtgggaaaggtggtcagatgttaaatataacttattaggaggaacagtgaactgtgaagtggttagaaaaaaaataaaaacttcttattagattagacctaggaaattcaagctgacccctttgcctaacttccctagagaaaaacctagaacttggtcatccctttataggagacccctaagttgttctcagggtttggagatgatgttctggagggagtacaagcaaataatctacttctggtaatctgagggtgctttgcgtatttggccattgctcagaagaatagaggttacattatattacattatatgaaaattatttagtttttctatagccctttgtagtttgcaaagcacttttccatatgtgtgtcctctcttccacaccatagccccctgaggaagtaattgttgtccccattttatagatgaaaaggctgaggcacagaggagctaaatatcttgttcaaggctatacaatgtgtgtgattattaggcttggaatcagggcctctaactctaaagcacatgttttttcaactatatgcagaaattgcctagccatggacacaagaaagctgggaggaagagttctacttgtggatgtttttaattttttttaaatatcaggagcaatccagggccatacagctatgaagcacttagtgaaaagaacacaagaagatttactaactgaagttagtattagtgattagaaaacaaaactgccagtttgtgcttcattaaggtgaactcatctctccaagcaggaagggaaaatttgctttccctagcagttgctgcatatgtgtgtacagactgcacaattctaagaaattgtgcaaaatggcatacctgtctttctcccagatacaccgccccctgccccccccaaaaaaggtcaggattaaaggtggtgagaagtgaacatttattaaacagaagttaaaccaatagagagaaaggaggtttgttggagtctaagaggattttgaccatgtagaaattccttgaaacagaccttaaaaggtattgaaaaattgaatcacaaagaaagtttacctttaaatacttgttaatggctcctagatcatggttataatttttctcaatgggaaaaaaagtcttaaaatttgttttaaataagatcctctaatgtctcgagctttttgattctggaaataatttgctttaaaatataaatcaatcagaaagtgatctaccactgaaatcattctaggaaactagcatgggatgcactgcacaatgttctttcctctaaaggcatgggccccataaactgtggcatctggcagcaggatgccatcagtcctttagaaagcctaattttgggccgggtgcggtggctcacgcctgtaatcccagcactttgggaggccgaggcgggtggatcacaaggtcaggagttcgagaccagcctggtcaacatggcgaaatcccgtctctactaaaaacacaaaaattagccgggtgtacgtgcctgtggtctcagctgcttgggaggctgaggcaggagaatcgcttgaacctgggaggcggaggttacagtgggccgagatggcgccatttcactccagcctgggcgacagagcaagactctgtctcaaaaaaaaggaagaaaaagaaagcctaatattgggagaatgtttgtgtaaggattggaaatctgtttatttttaaataagatagcactgatgtgaatcttgtttggaaattacagatactgccattaagcgatgcttttatcttcattaattcattttggtaagcgcctatgcatttctgatggttaggtgccctaggtagtgttaagtatgtccgtgtcctcccttactcccctctcgctccctctaccctctatcccctagggttcttttattaatggaatttctccagttatagagaaaaaaatgacatttgaaaactaaagctcatttatattaatactaaggtcctgtgggcctagtgcgttactcttcccagtgatacctagattttaagagtagagaacagaggaaacatgggatgagaggagagaggttttttagacaacatttgtagacacctcaaattatatcactgttctctagcgccaatattcccaggtaaattgaccattaaagcaatactcactgacctactagtttattttggtcagctgagtaccatcaggatatttaaccctttaagtgctgttttgggagtagaaaactaaagcaacaatacttcctcttgacagctttgattggaatggggttattagatcattcaccttggtcctacactttttaggatgcttggtgaacataacaccacttataatgaacatccctggttcctatattttgggctatgtgggtaggaattgttacttgttgctgcagcagcagccctagaaagtaagcccagggcttcagatctaagttagtccaaaagctaaatgatttaaagtcaagttgtaatgctaggcataagcactctataatacattaaattataggccgagcaattagggaatgtttctgaaacattaaacttgtatttatgtcactaaaattctaacacaaacttaaaaaatgtgtctcatacatatgctgtactaggcttcatcatgcatttctaaatttgtgtatgatttgaatatatgaaagaatttatacaagagtgttatttaaaattattaaaaataaatgtatataatttgtacctattgtagatttgttgtttacttttttgtgtggtcagagttgtttcatgtcttcaaatacatgccaaggatcatttactttcagcccacttcataaaaatctttgaactctt

SEQ ID NO: 85 - DNA, 2000 bp, Homo sapiens
tttgggctgtgtgtgcgacgcgggtcggaggggcagtcgggggaaccgcgaagaagccgaggagcccggagccccgcgtgacgctcctctctcagtccaaaagcggcttttggttcggcgcagagagacccgggggtctagcttttcctcgaaaagcgccgccctgcccttggccccgagaacagacaaagagcaccgcagggccgatcacgctgggggcgctgaggccggccatggtcatggaagtgggcaccctggacgctggaggcctgcgggcgctgctgggggagcgagcggcgcaatgcctgctgctggactgccgctccttcttcgctttcaacgccggccacatcgccggctctgtcaacgtgcgcttcagcaccatcgtgcggcgccgggccaagggcgccatgggcctggagcacatcgtgcccaacgccgagctccgcggccgcctgctggccggcgcctaccacgccgtggtgttgctggacgagcgcagcgccgccctggacggcgccaagcgcgacggcaccctggccctggcggccggcgcgctctgccgcgaggcgcgcgccgcgcaagtcttcttcctcaaaggaggatacgaagcgttttcggcttcctgcccggagctgtgcagcaaacagtcgacccccatggggctcagccttcccctgagtactagcgtccctgacagcgcggaatctgggtgcagttcctgcagtaccccactctacgatcagggtggcccggtggaaatcctgccctttctgtacctgggcagtgcgtatcacgcttcccgcaaggacatgctggatgccttgggcataactgccttgatcaacgtctcagccaattgtcccaaccattttgagggtcactaccagtacaagagcatccctgtggaggacaaccacaaggcagacatcagctcctggttcaacgaggccattgacttcatagactccatcaagaatgctggaggaagggtgtttgtccactgccaggcaggcatttcccggtcagccaccatctgccttgcttaccttatgaggactaatcgagtcaagctggacgaggcctttgagtttgtgaagcagaggcgaagcatcatctctcccaacttcagcttcatgggccagctgctgcagtttgagtcccaggtgctggctccgcactgttcggcagaggctgggagccccgccatggctgtgctcgaccgaggcacctccaccaccaccgtgttcaacttccccgtctccatccctgtccactccacgaacagtgcgctgagctaccttcagagccccattacgacctctcccagctgctgaaaggccacgggaggtgaggctcttcacatcccattgggactccatgctccttgagaggagaaatgcaataactctgggaggggctcgagagggctggtccttatttatttaacttcacccgagttcctctgggtttctaagcagttatggtgatgacttagcgtcaagacatttgctgaactcagcacattcgggaccaatatatagtgggtacatcaagtccatctgacaaaatggggcagaagagaaaggactcagtgtgtgatccggtttctttttgctcgcccctgttttttgtagaatctcttcatgcttgacatacctaccagtattattcccgacgacacatatacatatgagaatataccttatttatttttgtgtaggtgtctgccttcacaaatgtcattgtctactcctagaagaaccaaatacctcaatttttgtttttgagtactgtactatcctgtaaatatatcttaagcaggtttgttttcagcactgatggaaaataccagtgttgggtttttttttagttgccaacagttgtatgtttgctgattatttatgacctgaaataatatatttcttcttctaagaagacattttgttacataaggatgacttttttatacaatggaataaattatggcatttctattg

SEQ ID NO: 86 - DNA, 458 bp, Homo sapiens
ttcagctccttatggggcccggtatgtgggctccatggtggctgatgttcatcgcactctggtctacggagggatatttctgtaccccgctaacaagaagagccccaatggaaagctgagactgctgtacgaatgcaaccccatggcctacgtcatggagaaggctgggggaatggccaccactgggaaggaggccgtgttagacgtcattcccacagacattcaccagagggcgccggtgatcttggggtcccccgacgacgtgctcgagttcctgaaggtgtatgagaagcactctgcccagtgagcacctgccctgcctgcatccggagaattgcctctacctggaccttttgtctcacacagcagtaccctgacctgctgtgcaccttacattcctagagagcagaaataaaaagcatgactatttccaccatcaaatgctgtagaatgcttgg

SEQ ID NO: 87 - DNA, 542 bp, Homo sapiens
ttaaatgtagcttgtcagatttaccataatcctactaatttctttgcagcttattaattttgtgaaatttgtatatatgaagaatttgcatgtatgtgtatttacaaatttttctaagtatcttgaattctcagactgcaaaaggcctattttaactattgattttttttaaaaaaaattgtctttgaatgtattggaagtagacatgcattaactgtgacattattgcacctcagtttttttctttctttttttgggcaaactgatattatctataggatatttgtttatgtttgttttttgggggaaagaaactggaactcagtgttaccttaaagttacggaatactttgttttaaaggaaaagataataagtttagttatatctttttgttaatattcaaatgaacttgtttaagtatctatgtacagtaatgcctcattcatctagaggtaatctggcagtcttgtgaaaaccgaacacaactcagaaacttggaatcgttttttttaaaaatgcctctgagcaacccatataagtc

SEQ ID NO: 88 - DNA, 220895 bp, Homo sapiens
aagcttgtgttaaagaatttgatttgattaagggccgggcacggtggcttatgcctataatcccagcactttgggaggctgaggcaggtggatcacctaaggtcaggagttcaagaccagcctggccaacacgaagtctctactaaaaatacaaaaattagctgggcgtggtggcaggcggctgtaatcccggctacatgggaggctgagacaggagagttgcttgaacctgggagacagaagttgcagtgagctgagatcatgccactgcactccagcctgggcaacagagcaagactctgtctcaaaaaaaaaaaaaaaagaatttgatttgatttaaaaggctgttggatgaacaagatactcaaagaagatgttcgtcactgggtaggaggctatggttgaaattaaggcagagtgtggacgggagtgaagaggtaaatccatgatgctaaggaaggagacttgagtgaacttaaggcaggaggaaaaagaaagagcaatggaaagtggagctgcagatccctctcctgttcaaactatgagagctggctcaggtcccctgctatagtgggccagaaaagcctggacttccactgctttttcctgcagagctgagtccctccagggctgccatgagaggcggggagagagagcactagacagagaagaccagaagaccatttgagaattcctttgggtttccttcatgattcctttttcttctcattctgaattgttttattttattatgtaatattcggtatatgcaaaggaatatatgacacctttgtgtgtattacaaaacaagcatttgagaatccgcacctctccacccaatttttctttgtggtttctttgccagtaaaagagttcactcatctgttgcttaaaatataggatgcttgagtcaccagcttgccatcctgtgtcattcaacacctcctccagactcttcgcaggaaggtgacccagaaaccccttgaaggacatgataccgtccctgtgctctgatgtgccccctggtgtttgagtggagtgatttttagatagcggtttgcctgttaaaaccttccctttgttccctatattattgcttgcattttagggcttctcagttgaaggatgtggttgaaagagcccagttcctcagctgctcctctgggtgactagagtgtgggtaactgatgttttaggtcctggagaaagcagtgatgatcacaaatagtagaatggagaaatggttatctcatattgatcttcaggtttgttactagtctacatttggttttttaaataattattagaaaaaaacattgtgggtggggagataggatcattatgatgaaacagttctgtacattcaatcaggatacttgttgggaattagattttgcatttacctccctcactggtgtggtccatctcattttcagtggcctacacacatcacacaccattattatttccatgttcttgtacttgttgggcagctctaatatgaaagataaaatgaacgaaaagtacaaatgaagaaagtttaggtgactattcctctgatcttgaggatgagggtttttcttaagcgttacacagaagccatgtaatttcactatacaatgtaaaaatggtgtatagtcagttctgctatagttcatcatgtgcatttctaaaaatcatgccatgcgaaatcatgcagtaaaaaacacggagtgggcatgttggctcatgcttgtaatcaggaggctaaggtgggaggatcgcatgaggcagggagttcaagaccagcctgggcaacaaagcaagacccagtctctcttacaaataaaaaataaaaattatctggacatggtggtgtgtgcctgtactcccagctacccaagaggctgcagtggaggatcccttaagcccaggaggtagaggccacagtgagctatgatcacatcactgcactccagcctgggtgacagagtaagaccctgtctctaaaacagaaacccagaacttactgtgaaatggagggttaaggatcacaacaataaaaaatctcataggtgaccaaaaaaaggaaaagatttattttttaaaaaagatagggacctgccgggcacagtggctcacacctgtaatcccagcactttggaaggctgaggcgggtggatcacgaggtcaggggttcgagaccagcctgaccaacatggtgaaaccccgtctctactgggcgtggtggcgggcgcctgtaatcccagctactcaggaggctgaggcaggagaagtgcttgaacccaggaggtggaggttgcagtgagccgagatcccgccactgcactccagcctgggcgacagagcaagactccgtctcaaaaaaaaaaaaaaaagtggggggacctaataaaacagtcacacagttttatagaccagaaaaactaagaaatatataaataccacaatgaaaaggcactttggcttgaaaaacacctgaggtttgcttgtgggaagtaagtgtcattaggttacagcttgggagttatcaggaagtggtggaaggagggctgtctgaagtccaatggaaagttctgacatcaatgtgatgaatgtgattcataacacatgcagtgacctgatgaagctggtagatgtttaaggtgcctgtgtatgtgtgtgcacattttgtgcattcctgcatggctcatttcagccgaatatggttttctgcacttcctagtgtttttctcatgcataagcaaatgcaaaatttatattatgctcagattgtttctggatgtatctgatgcatttgaacaaattcacattttcaaagtaagagttaaagcaaaagtgtcaaaaaaaaaaaacccactatgaataatgtgtactagctaatactaagtgccaggcatggtgccatagattccacatgagttatctcatcaatccgtgagttagctgtaattgttagccacaatgtacagttgagaaaaactgcagctgaaagaggtaaaacttgccccaggttccaaggctaggatatggtgattctttttttttttttttttttttttttttttgagacggagtctcgctctgtcacccaggctggagtgcagtggcgcaatctcggtgcaagctccgcctcccaggttctcgccattctcctgcctcaaccgcccaagtagctgggactacaggcgcccgccaccacgcccagctaattttttatatttttagtagagacggggtttcaccgtgttagccaggatggtctcgatctcctgacctcatgatccgcccgcctcggcctcccaaagtgctgggattacaggtgtgagccaccgcgccaggccgacatggtgattcttaattgctatgtcattctttttttctgaacatattaaaagagaaataacaaagtgggggaagtacttgcagacatttaagaagaataagtatctataatatctggaagttttttaaatcagtgaaaaaaaaaaaaagacaaaatagcctgatagcaaaaatggacgaaggtcaagagcaggcggtttacaaaggaagaaatgcaaatgctcaataaaattgggactttagaaaaaaaaaagactttcagcctcagttagtactcagtcatgcaagacaaaacaattccatgttggttttttccactatcagattgacagaaatggctgtgaggaaacactagcaggagcatagatttttgaaacctttccaaagcatgtatagtggtcctttgacccagccatctaacttctaggaatttatcctaagaaaatagagaagtgggggaacaaaagagttgttaataatgccgaataacttgctgggtgtggtggcacacgcctgtaatcccagcactttgggaggccaagtcaagaggatcgcttgagcccaggagtttgagaccagcttagacaacatagggagactctgtctccacaaaaaaaagatttctttaaagttagccaggtttggtgatgcatgcttgtagtcccagctactcaggagtctgaggtgggaggattgcttaagcacaggaggtagaggctgcattgagccccaccactgccttccagcctgggcaagagagcaagaccctgtctcaaaaaaataaaaaaaaaagataaggctgaaaaatttaaagcaatttttcatcattaagttaaacaaattttaatacactggtacagtacaatggcacacagaatgataccgtgggactctgaaaaggatgatgttacgtctgtaatggttgacactgaatgttcttcatatttattaaccaaagggaacagggtgcaaagtagcatgttcagtgtgatctcatttttgtaaaacaatttgcatgcatgtgcatgcttaagtgtgcaagcaagccttgtagaggaagaaatctggaagggcacacattaaaacattgacaatgggccgggcgctgtggctcacgcctgtaatcccagcactttgggaggccgaggcaggtggatcacaaggtcagcagttcgagacgagcctgtccattgtggtgaaaccccctctctactaaaaatacaaaaattagctgggcatggtggcacgcacctgtaatcccacctactcagtgggattacaccgggaggctgaggcaggagaattgcttgaacctgggatgtggaggttgtggtgagccaagatcatgccactgcactctagcctgggcaactgagtaagactccatttaaaaaaaaaaaaattgacaatggatgactcaagaatagtggaactgctggatgatttttatttttgttcttttcatttatatgctttctaaatttttctttagtgaatatattacttttatgattttaacaaattattaaaaacagggccaggcgcagtggctcacacctgtaatcctagcactttgagaggccgaggtaggcggatcatctgaggtcaggagttcgagaccagcctggccaacatggtgaaaccctgtctctactaaaaatacaaaaattagcagggcgtggtggtgtgtgcctgtagccccagctacttgggaggctgaggcagaagaatcacttgaacccaggaggtggaggttgcagtgagccgagattgcaccactgcacgcctgggcaacagagcgagactttgtctcaaaaaaaaaaaaaattattaaaaacattgtctaacacaaggtgcataataaatacaaaatataagaataaatgacctttgtaaactaggtttcccagcccctaatagggctgggtaacaaatacctgttaaaggattattgactgaatctgtaatttggagaaactgtaaccctatttggaggcttcacattctttattcttgaccagaattaatttaaccagatttcaggttacctcattctcaggtagatgctgaaggctgagctgagcaaagtgatatttatgttacctccaagccacaagctccataaagttcatgtgaactcagggtctctttgtgagtcatggggctgcttgcaatgcacggatgataacaggaacctctaattttggttatttgcttttagagaccagaacccagatacagtttcctggggcctcacctactttgttaagcaacttagctataagtttacaaagcagctaaaaacaggagcaggggagtgagatgagcttgagcgtgccagcctagctcgtgggaggcctgtctctggccctgagctttgtggcctgccgtaggaactggagcttcattttcaaagctccataaaactcgccttctcccgggcctcccttttctgagtttcatggctctctgtggaaatgacagcctgtgtaatcacagaatgtgaatgatcagagcagggaacagtgaggagccattaggacattcccatgggtgtagctcacagttacaaagcacaactacaccctggttctccaggcctcctctttcctggcaccgcagaccagatggggtcctggagaggctctgcgtgcccttctggagcttcccatcactcctttctgcagatgttcatcttaacagcccctctgtgccactcagcccagtacccggctgcccggctgactggagatggctccactggagctttttgtgtgtgggttgaaagggacttttttattttaatttaagtagtctcattccatctgcctacacactcttacgcttcgtgaactaagctttctgacctgtgtaggttacttcaccacaccagcccatatctttcccacaaaagggtttcaagagtacttgacaaaatgagatcagtgcacccacatgcctgtgtagtgggtgctctggaagtaccgccaacattgacctgcataagggtctacccttcaccaagcacttcggataaattatcttattaatcctcagggcaaagaggccaagtgtgtattttcaaagcagccttttgtagtgaggaaaccaaggcttaaagagaagtatcttgcccacgctcacaccactgattaggtgggcctccagagactcacacctaggcctgactaccaccaaagcctgtgcgcatctatgaggccaccctggccttctgccctccttagctttccatggatggaaactgtcggccagtgtgtgatattcttctggctctgtgttacagccctctgtattgatttcttacagagttgggattttgggggaattctaaaaggttcaacaaattcttagatttctcttagtcattttcttaaagcattttataatcttgtacttggagtgtgtcagcactaaattatgttttgtttaaatgtactgaatttgaggacatttctcagtttaatcatgtcacggaattggaattggttagtacaagctgcaatatctgtagcaatctgcccatttctccctcgcacaaggctgagtgaggacagagcttagtgtcaagatgttggtaaataataccactatgtaggaatgtagtctggtgagatgctgtttttcccagcaggtttaactgactgaatacttaaggtgcccagattgaaatgcaaagctccagttatcccatatggagactacactagaaagccccagcagctttatttatttacatttatttatttatctatctatttatttatttattttttgggacggagtcttgctctgttccctaggctggagtacagtgacgcagtcatctcggcttactgcaacctctgcctcctgggttcaagcgattctcctgcctcagcctcccgagtagctgggattacaggcacccaccaccatgcctggctaatttttgtagtagacaggggttttcaccatgtttgtcaggctggtctcgaactcctgacttcaggtgatccacctgccttggcctcccaaagtgctgggattacaagcataagccaccacccctggcctatttacatttaattatgatttatttttcctatccttctgcaagcatatatatatatatatatatatatatatatatatatatacacacacacacacacacacacaaaatatcaaaatatatatatatatgtatatatatatatatttttttttttttttgagactgagtctcgctctgttgcccaggctggagtgcagtggcacgatctctgctcactgcaagctctgcctcccgggttcactccattctcctgactcagcctcccgagtagcttggactacaggcgcccaccaccacgcccagctaattttttgtatttttagtagagacggggtttcaccgtgttagccaggatggtctcgatctcctgaccttgtgatccgcacgccttggcctcccaaagtgctgggattataggcgtgagtcaccgcgcccggcccaaaaaatctttgtgtttttttgtttgtttgttttgtgttcagagaagggatctggctaggtgccctggctcatgcctgtagtcccagcactttgggaggccaaaccgagaggttgcttttcaggagtttgagaccagcctgggcaacatggtgaaatctcgtctctacagaaaatacaaaaattagccgggcatggttggcgcacacctgtggtcccagctactcaggaggctgatgtggaaggatcgcttgagcctgggaggtggaggctgcagtgagctgaaattgcaacactgcactccaacctgggtgacagagcaataccctatctcaaaaaaaagagagacagagtctcgctgtgttgcccaggctgttctcaaactcctgacctcaagtgaccctcccaccttggcctcacaatgcactgggattacaggcatgagccaccacaaccggtctcagcagctttctgtttgtcagatatacaaatataccccaggctccaggcccccacatcccccaaaaaacacacacacacacacacacacagcatcagagacctgagaaggacatcttggtggaggtttgggggaatggagatggttccttttatttttttatagtggtggtgtggtggtttttgttgttttggtgtctaaatcagagcatcacatggccttgaaggtttggaaaggaggggccatagttcaagaacaagcagtagcttcttgggaacgtattggagagagaaaagagaaaagaatatggacaatgtagagaattgtaggtctgaaactatctgggacaaagctgaggctcctgacttctatagggaccagtcatatgaaaaagaagggagtcgtgagagatgatggggtagttgtgggttaagttgggttttggaaagcctttgggaagattgaccagggaagaggccctggaagtaggcttgagaccctttgggctgggaatttaagggtcccagctacttggaacatgatctagaaagggaagcgaggtctccaggtggacaaatccctttggacccaagactccttgcccagagaaaaggggcacaaccagacaagggctagcatgggccctgggaagcacggagttcagggtggggcaggcttgctgtgtcctggcctggcaacatacctgcactgtgttgtggtagaagaacacaaagctgggaggcagagaactggttctaatcctagctgtaccctgacaagctgtgtgaccttggccaagttactttcctctcctggacttcatatatggtttttccattctttgcatccctgaagctccatgacttaggggccatcaacttggttgtccctgagtgtttccaagaataccaacagtgcccagggttttactcagcttggagaggaggcctagagcctccctgtggtgaggaggaaagaggttagagcaagtttgggtctgcagtgctaggattagaggtggcctcacaagccaaaaccgctatactcacagccttaggacagtgactccctactcgctgcctcagtgtttccagctgtaaaaaaggacccttggtaccttcgacagaacagcacccatctagtacaaaggtagttccttttatgatcaaaacaatcaggaaaaagagagaggctgggtgcggtggctcacacctgtaatcccagcactttgggaggctgaggtgggtggatcacctaaggtcaggagttcgagacccacctatcaatatggtgaaaccctgtctctactaaaattacaaaaattagccgggcatggtgccgtgcacctatagtcccagctactcaggaggctgaggcgggagaatcgcttgaacccaggaggcagaggttgaagtaagacaagttcgcgccactgcactccatccagcgtgggcgatagaggaagactccgtctcaaaaagaaaaaagaaagaaaatgagagaaagggcctggaggtgagtgtgaggagggaaaagaacatcaaacagataaagtcctgtcctgttgtcctgggaccttgggcagccatcttggcccagatgatccccacaagaaagaggtaagggtttcctgacccatttctgccatggtcttaggaaagtcattgagttttcatgccttagtttcttaagcaagtttgaaagttcactttttggatagcaataaaattactccttttcttttgttcacagagatgctgcaatttgtcagtaatcaagtgggagagttccctgacttgttttcagaacagctgtgtagctcctttcctggcagtggtggtagtggtagcagcagcggcagcagtggcagcagcagcagcagcagcaatggcaggggcagcagcagcggagctgtggacccttcagtgcaacggtcattcacccaggtcacattaccttccttctctccctcggcggcctccccacaggctccaactctgcaagtcaaggtttctcccacctcagttcccaccacacccagggcaactcctattcttcagccccgcccccagccccagcctcaacctcaaactcagctgcaacaacagacggtaatgatcacgccaacattcagcaccactccgcagacgaggatcatccagcagcctttgatataccagaatgcagctactagctttcaaggtgattcagaagttagaatggtagtggttggttggttccaatgtttatgtgccagtttgcagacactgtaaatatttctgtcgtcttcaggaatggcaggtatatcaatatggtcctgtctgaatgaggttctggtaactggcaataagaactggtacaggagcatgtcacattctgcagcttcaaataccttaatatctattgcgcctaattcaaaaatacttggttaaaaaatccagcaagcggccgggcgcggtggctcacgcctgtaatcccagcactttgggaggccaaggcgggcggatcacgaggtcaggagattgagaccatcctggctaactcagtgaaaccccatctctactaaaaaatagaaaaaattagccgggcatggtggcgggcgcctgtagtcccagctactcgggaggctgaggcaggagaatggcgtgaacccgggaggcagagcttgcagtgagcagagatcgtgccactgcactccagcctaggcaacagagcgagactcccatcttaaaaagaaaaaaaaaaatccagcaagcatagtagacacagggccattctgataactagtggtggagacttgaataaggcttgaaattggctaggcggcagccagatctcagctgccacagttgagaactattcattcagcaaacatctgagcatccactatggtgatgaatatgacttttaatataggtgcagcagcttcaagtagcaagcctcatgctgggcccttagtatgtgttgagggaatggatgactgaaaggggcctgttctttctgtgatgtgctgcatcccagtgccttttcatcatatttccctctgactctgtggggagcccagggtaagattagtattgctttgaatttcaaagaatcttatagttcttcaatggagttcaagaattgggacaggtgggggaatgtaaaggcaaaaagctgagacagtcctcccaaagtgcacttgccgtccagaaaggatggaagaaaatgaagccccagggagttgttgattctcaacatctgttaactcccttgctgggtgcagtcatttgctgattagcttccctttcccccaccctggcacccagagtaataaaacaatttgtactcgttccctcagaaattgatgcagcccttatgggatgttcttgttgtctaagccaccttgtaaatggctgtgcacatcatcttcagcagtaggtggggagttggaatcattatgagatactccatcctcaggtttctgctgcagctgcagtgacagaatgcattcctcatctctgtgccttctttctcctcttctcccaagtccttcagcctcaagtccaaagcctggtgacatcctcccaggtacagccggtcaccattcagcagcaggtgcagacagtacaggcccagcgggtgctgacacaaacggccaatggcacgctgcagacccttgccccggctacggtgcagacagttgctgcgccacaggtgcagcaggtcccggtaagtggctggaaaggattcagggaggcactggttggggctgttaactggtccttggttgaagatgtggtctacatactaagaaggaccaaccagagtgtacacaaagcagcttgtagggcgccaggatgcacctgtgagcagcgtatagtgacctggctgagtccatatctgtagatagacactggcactcaggaaaggctggtgcagtcacttacgtacacatgtaatgggcataaaactggaaagaaatgtgctaaattggtatttcccagataattttctttttcatagttttgtgttgtgtttttttgttgttgttgttgttttgagacggagtctcattctgttgcccaagctggagtggagtggtgtggtctcagctcactataacctccgcctcccgggttcaagcagttctgctgcttcagcctcccgagtagctgggactacaggcatgtgccaccacacccggctaatttttatatttttagtagagacgggatgttggccaggctggcttgaacttctgaccttgtgatccacccgcctcggcctcccaaagtgctgggattacagacgtgagccactgcccttggctttcatagttttctgttctccatattttctgctgtggatcctgaacatatattgggttggggggagggggggcatgtattattaatcttttttttaattttttttttttggagacagttttgctcttgttgcccaggttggagtgcagtggcgtgatcttggctccctgcaacccccgcctaccaggttcaagcgattctcctgcctcagcctcccaagtagctgggattacaagcacctgccactgcacctggctagttttttgtatttttagtagagatggggtttctccaggttggccaggctggttttgaactcctggcctcaaacagtgcatcgatctcggcctcccaaagtgctgagactacaggtgggagccactgtgcccagctgggggacgtgtattatttttataatcacaaaaaacgtctttatgttatatatcatcgtggactatatcctcttttttctttttttttttttgagagtcttgctctgtcgcccaggctggagtgcagtggcacgatctcggctcactgtgcaacctcagcctcctgggttcaagcaattctcctgcctcggcctcccgagtagctgggattccaggcacgcgccatcacgcccagctaatttttgtatttttagtagagacagggtttcaccatgttggttaggctggtctcaaactcctgacctcatgatccacctgccttggtctcccaaagtgctgggattacaagcatgagccaccacatctggcctatattttcttactaacaatttatcttaaaaaaatcaggtttattatttttgcttctcagccatgtgtctggctttcctgagtcttttctctcctctctgccatccaccctacccatctctgctctgctcctgctgggccactggcaccaccctcttgaaagtctttcaacctaaaaacccatgacctggctgagcaccatggctcacgcctgtaatctcagcactttgggaggctgaggcaggtggatttcttgaacccaaaagttcaggaccagcctgggcaacatggtgaaaccctgtctctacaaaaaaatacaaacaattagccaggcatggtggcacacacctgtagtcccagctactcaggaggctgaggcagcaggatcacttgagcccgggaggtcaaggctgcagtgagctgagattgcaccactgcactccagcctgggcaacagagagcaaccctgtctcagcaaaaaaaaaaaaaaaaaaaaaaagccaggaccctcattagctagcccctctttctccacctgaacccggtattcaggctgtacaaaatagccggcttttgaaatggcctctatgaaatttcctgttcatttttttattctcaatttcataaaaattatatcatttctcattctttcttggaaggtctatgcagtaagaaaggaatgcataacagaaggataatgctatcatccttttacttttcttccttcttcatccaggtcctggtccagcctcagatcatcaagacagattcccttgttttgaccacactgaagacagatggcagccctgttatggctgcggtccagaacccggccctcaccgccctcaccacccctatccagacggctgcccttcaagtaccagtaagagctgccttctcccccaccctcctccctccccctttattcctggaggtgttagtcttcagagatgttaaatctctatatgctgagtaggtatgggagggtctatagcacaaatcagtcaaattgtaaatgtcacccctcttagttgtttttcgctcgaaaaagtattagcaatgtgtgttcgatgtgggagtactggagtctacaaggaggtagaaaagaatagcagaaggaccctctattcttggctaatagctccacacaagaccattcacctcttagatcctgctgatgacttctgaaggaccctagggccaccaggcagggaagggctccaaggtgaagaacatggaaggtaccccatccttcagttgtaggttcttagccactttcagcatcctatagcatgagaatctgatagagtaaatggtgattaaaatttagaagcactagctttattcataaaatccaagaactggaagcaactcaaatgtccatccacaggaaaataagcacattgtgatatattcatacaatgaaattatgcctagcaattaaaaaacagaactgctgacaggcacggtggctcacgcctgtaatctcagcactttgggaggccaagaggggtggatcacctgaggtcaggagtttgagaccagcctggccaacacggtgaaaccccatttctactaaaaatacaaaaattagctgggtatggtggtgcatggtgcatgcctgtaatcccagctactcaggaggctgaggcaggagaattgcttgaacctgagaggtggaagctgcagtgagccgagatcgcaccactgcactccagcctggatgacagaacgagactgactctcaaaaaaaaaaaaaaaagctactgatgcatgaaacaacatggggctgtccctcagaaatagtgtgtcaagccaccgggcgcagtggctcacacctgtaatcccagcactttgggaggccgaggtgggtagatcatgaggtcaggagatcgagaccatcctggctaccatggtgaaaccccgtctctgctaaaaatacaaaaaattagccgggcatggtggcgggcacctgtagtcctagctactcgggaggccgaggtaggagaatgtcgtgaacctgggaggtggagcttgcagtgagccaagattgcgccactgcactccagcccgggcgacagagcaaatctccgtctcaaaaaaaaaaaaaaagaaatagtgtgtcaagccaaaggagttcatgctaatgagtccatttatatgaagtttaaaaagaggcaaaatgaagctatggtgctggaattcagagcggtggtgacaaggaggggaggggcatgcggggactttctgagctggtagaaatgggctatatcttggtctgggtggttatatacattgtgtacatatgtaaaattcatcaagctataaacttaagatttgtggtttttattgtgcatgacgtacttattggcaactaatgaaattgggcacctttttatttatttattggctgattagatattgaggccattatttaagaaattaaactaaaattggtccaggcccagtggctcacgcctgtattcccagcattttgggaggctgaggtgggcagatcacctgaggtcagtagtttgagatcagcctggccaacatgatgaaatcccatctctactaaaaatacaaaaatgagccaggtgtggtggtgggtgcctgtattcccagctactcaggaggctgaggcaggagaatcacttgaaccaggggggtgcaggttgtagtaagctgtgatcacgccactgcactccagcttttgggcaacagagtgagactttgtctcaaaaaaaaaaacaaaaacaaaaaaacaggacgtggtggctcacgcctgtaatcccagcactttgggaggccaaggcgggtggatcacctgaggtcagcagtttgagaccagcctgaccaacatggagaaaccccgtctctactaaaaatacaaaattagccaggcatggtggcgcatgcctgtaatccaagctactcgggaggctgaggcagcagaatcacttgaagctgggaggcagagtttgtggtgagccgagatcacaccattgcattccagcctgggcaacaagagcgaaactccgtctcaaaaaaaataaaataaaataaaataaagttagaaaaaataagaggagaaaacagagatgaagaataaaaaggggagacctccatggttggcctatttacttaatcaaatggctcttattgagagtgtcacttctgcccttgagctttttgatggcaaaattgtataaagaaatgcagtaatttgcttaattgtcatttgagaggaaaaaatgtgtcatacactaggagaaagttttctctggtgccaactcgtggttcaccgtgtacaactttagaagtggttaacagtttgacagcaaagcagaaatcatatgacttgtttctggcatacgtagatcaaaacttaaaacatatttagccatgttaatcctcttgtggtgtagtttatcagcagtgattcttgaagggaggtagtaaccaaggttccgtggctcctgagacttcttggggcctgatttgattaacccaggaagagtctcagacctcatgaagtactgccaggtctggcagcacttggccaaagcgggcaggtctgtgttgaggttgctttatgcagactaacaaagggatcattctgctgtgtacctgtccctattctagaccctggtgggcagcagtgggaccattctgaccacaatgcctgtaatgatggggcaagagaaagtgcccattaagcaggtacctgggggagtcaagcagcttgagccccccaaagaaggagaaaggcggacaacccataatatcattgagaaacgatatcgctcctccatcaatgacaaaatcatcgaattgaaagacctggtcatggggacagacgccaaggtgggtgccaagcaaaattgtgttttatgttccaccatctcccctctacctgtttttgcctcaggagcctagagaagtcccaggctcaaggtaagtgaatacaagaccgagttagaggtgcttttttattaaagcatcttggtgtcatgtcaagattataaaatattaaaaaacataagggactggtgagggttgataaggcagtgacccgctgagacctttgactcctttggctatgctctgcagtgatggggactccactgtcagaggcagagaaagatgcctgccactcagtagttccagatacaggactgtgtgtaccttggagtcagctgatggcatagttttagctgtgtttaggggttaccttttaaggaaaagaaagaaaaaagaggttgagtctttgaccagcaacacatagaggaaactgatgttccaaatgtttctggtgtttcagtgtatgtgtcttctagaaagtaggagattttatttttaaaacctatctatgtttaaaccctattttgaaagaaaatttcattttccttgcctacaaatctgaaagctgtacatcctaagtaaaaatctatgccttaagataactgtccaggctaggcactgtggcttacgcctgtaatcccagcactttgggaggctgaggcgggtggatcacgaggccaggagttcaagaccagcctggccaacatggtgaaaccccgtctctactaaaaatacaaaaaattagccgggcgtgctggcaggtgcctgtaatcccagctacttggaaggctgaggcaggagaattgtttgaacctgggaggcagaggttgcagtgatctgagatcgcgccattgcactccatcctgggcaacaagagtgaaactctgtcttggaaaaaagaaaaaaaaaaagataactgtccaacaatgctgtggttgtttttttcatttgttttcgttaaagtttgttatggtgctaggattattataagaagtgggaacaatagctaatatttattgagtgtcaactatttgccaggctcagggctaagccctttacactcattatctcatttagccctgctgcaagcctgtgattcacgcgctttcattatctctgtgctaatgaggaggaaagtgaggttctgaggtatggaataacttctcccgagtggcacagctaatcattgggaggaccagcatctgaacttggtttctcctctcacagagccatgctgtcatcccaagtgctagggctctgctcttttcacactgtagcctgcactggtctcactgtgttttcactcatcttcctacccagatgcacaagtctggcgttctgaggaaggccattgattacatcaaatacttgcagcaggtcaatcataaactgcgccaggagaacatggtgctgaagctggcaaatcaaaagaacagtaagtgtgctgagaaaaggcttgtcagccctggcccaggtggggctttgtaaaagcagatcattttcaccaggtggggttttctttgcagagcttctaaagggcatcgacctaggcagtctggtggacaatgaggtggacctgaagatcgaggactttaatcagaatgtccttctgatgtcccccccagcctctgactcagggtcccaggctggcttctctccctactccattgactctgagccaggaagccctctattggatgatgcaaaggtacagacttttgaaatctcctgatccctggaatctttcccatttcccctaagaagatagctgggaggtcacagttatgaggccaggccgcatgttaagagggcctagcctggagaaaaacaggaattctgtgaaattagccaggtcctggagaataaagaaagaaaaaactgactccggggggaaacagtccctcaggtttaactggtccttgccgataggccccgtcagagaggaatgagtgccagatccagaacgagaatgcagagtagctgttgtgggggcgttgggagctgctggaggcacctcattgcttcactctgcctttaatgggcctggcaagaccactttgggaggctgatcagttggtttaggatgaggctgcctctgggtcctcttttcagaaatgattacaatttgcagtctaacagataacattttacctatgggcctttaatcgtcaaagcccctggcaatggtagtttaatggaattacttaagagacgctctgagcctaatgatcttcctgggaacctgtagagaccactgggttttgtactgtattttgacttcggcagtttctgactctgaaagcacaaagttccctcctagtgtttgtttttgactaagctgtttattgtatcatatacttaattttactaaggaagctccatttttgaaatattcttataaatgtggttctgtttggcaacaacaggctgtttgacatataaattgaattagctgggcttctgagtcatcagaagaaaatcttaaatggttttaaaatattgaaaagaaatgacatgctatatacacattggggcgcaggggagatctggcttcagccctcctgctgtaaaatggagagtggggtgggtgtagacaatgatacagttttagaacaggtaaaatcctttagatagattcacactaaatacggtctttgatcaacttcattgaggtgtaatttaaatgcaataaaatatacctactttaaaagtacagtaccaagagttttaacataatgtacagtgctatgtaactgtcactgtaatcaagatatagaacatttccatcaccccaaaaagctcttttgtacacctttgcaggtagtttcccacacccctctccagcctcagacaatgactgattcattggtttcctgttactttagattcattttgcctgttctggaattatacagaaacagaatcatacagtgtgttctcttttgtggtagatttctattttaaaagaaaatctcttctacctttgttctttggaacatgtacttttctcagttagcaagcaggtgaatgtgccaatgtttgagcagcagttagtgaattataggcttctcagttcccatctggccttagtcctgagttaatcgacttgaatttaaacctcataaccatttctcaatatatatatatgtatttataaagtgctgtaaaaacctatgcagtatttattccaacctcgaggccttgttttgaaggtcaaagatgagccagactctcctcctgtggcgctgggcatggtagaccgctcacggattcttctgtgtgtcctcaccttcctgtgcctctcctttaaccccctgacttccctgctgcagtggggaggggcccacgactctgaccagcacccacactcaggctctggccgcagtgtcctgtcattcgagtcaggtaggtggaggccccttgccccacctgggcatggctggaccactatggcaggagaaggaccctgtgtacaaacttcttggcttggctaccaggtcccaaagggcttttatagtgggcccccacctgcttgcttctgatagggactggcataagttccattttagaagtaacaaggcaagcccaagttcagtcagaatgagcaaaacaaatcagggacccacactactctaaataccctggggtggaggggtggtacctatttgaaggaggatatcgtgttttttatctgaggttgcaaaaccaatgcctcaaccctttcaaaacaaagatttttatggcactcagctccataatgagaagggctacagtcattagccctgtttagattatagaattatttgccctttcttctgaaaatgaggtagaagactctttcctgtgatagtgctggggtctgtcaggtgcctggctgctccgcaaggcctttcctagcagactctgctgagacgctccttcttaggttctgggggctggtttgactggatgatgcctactcttctcttatggctggtaaatggtgtgattgtcctgagcgtctttgtgaagctgctggttcatggggagccagtgatccggccacactcgcgctcctcggtcaccttctggaggcaccggaaacaggcagatctggatctcgccagagtgagttctgtgtccgcccttccccatcctcccccagacttgacaaataattcagcaactcgtgtcaaagaaagtcctatgatagatgcttgtggtgagaggaaaaagggaccctgctgctgaatagtcacagggcagtggagtgggcgcctctgcatagataattaattccagggacatgagatgatctatgtctccggtatgacaggaataatgaagttgagttctgagggaggggttctagggcttgagcggggctgccaagagtaggaaggaagggcagaggtggcagaaggaccttccaacccgaacacatgaatggacaggctgtttggagactggcaggttccagggtgtgttgagtgtaggttatgtcagagagagttgaaggcaaaggctggtagtgtgtctaggcccaaattggagagggctttcactaggaactgatttggggctttattcccaattctctatagaaccaggaaaggtttttgagcaggaaaactagctgaaagttttcatttgaaatcaacagggagtttacggaaaaaaatctggggcaactcacagcattgaggaagagttaaacatccacatttcaagaggaacaagaaccagaacactcctcagcagcagtgagccatgggcctgccctccccacctctgcaagctgcagggccattagtgagaatctgattggccatcctggatctgtcagccttgctggggctatgggtctcagaatatagatgtgattttgagaggcctgttccttgagtataacatcccaagatgtatatcctagaggcaggttcaggtgtgtgttttacaagcatcattatggtggctgtgaaggataggtaggagggagatgtgaaatgcatggaacatggcaacaagttagggtgctcttttttaagtaaagacaaggtctcactgtgttgcctggctggtcctgaactcctaggctcaagtgatcctctcaccttgacgtcccaaagtgttaggattacaggcatgagccaccacgcctggctgagtcagggggctctatgaaatagactgagtaagagatgatggcaaggacctggaattaaaaggaaaggtttgaactgaataagtatttgaaatgtaatatttggaagggaagtgattagtgacgttgactcaaggataagagaggctccaagatggagtggactccatctaggccatgttgcctggaaaagctggaagaggcccctgtagagtgagcagtgattgagaggcaggccatggggactgagcaggggcggggccagagtgtttgggaagcatgtctgtcagcagagggttcttagggagaattggactggggagtcaggaggggtaagagccaaagactgggacttgggaatagcccatctttgagggaaaggcaggggaggagccagggaacacctgcctcctttggaatctgcaaatgcaggtccttctggctggaaagatagaggcaccttagagactgttgctgtgaggacatcttttcttttcccttgtccagtcctgtaatgatgtgggaaacaaagcacagatagtgtaccagctgcccaatagaggaaaataggagaatttactttcatttcccaagactatatagcctgtcctctagtttccagcagtgagagagagaaagcgagcggtctccagtacagtgccgtagactctccattagaccctctcaggttgacaaagattagttcatctgaatcctagagtagggtagtttagctgtgagtttgcctaaaaccatggttctcaaacttcagcaggcatgaagccgggtgctgtggctcacactgaggtggggggattgcttgagcccaggagttcaagaccagcctgggcaacatagcaaaacccccatctctaaaaatgaaaagaaacgctttagcagacatggcatgagaatcacctagagggctgcaataccagagattctgattcagtagccctggggtaaggtccaagtgcttgcatttctaacaagctcctaagagctgatgctactggcctctgggggccacactttgagaccctgaaagcctaaaggatcatgcagttcatctaaatctgtgtcaccaccttatgtctaaaagctactgctggccgggcatggtggctcacgcctgtaatcccaacactttggaaggccgaggcaggtagatcacttgaggtcaggagttcgagaccagcctgaccaacatggtgaaaccctgtctctactaaaaatacaaaaaaaaaaaaaaaaaaagtgctactctgagggaactctgaccagcatttgctcatagaacaaacgcacgcagtacaatctcaatcgagtaaaaagtctgtaaggaaatacctcagaatgtcagcagggattcttcctgggggatgagattataggtggttttgttttactttcttgtagctttctgaagtttccctcgtttttatgagtgtgcactaattcctctgataattgggggcagggggagtagaagtctatatcaaaacaaaaagccggagcaaggccagtgaccattaacaccttttgatactttgtagggagattttgcagctgctgccggcaacctacaaacctgcctggcagttttgggccgggcactgcccacctcccgcctggacctggcctgcagcctctcctggaacgtgatccgctacagcctgcagaagctacgcctggtgcgctggctgctcaagaaagtcttccagtgccggcgggccacgccagccactgaggcaggctttgaagacgaagctaagaccagcgcccgggatgcggctctggcctatcaccggctgcaccagctgcacatcacaggtgagggggcagctgctgctgcctggcttgctgcaaggcatctcatgctacctctcctccttagcttgatttgccagttctgcaccctagctgaagtccctttaacgctactcttttagagtggctagaccaagcttctacctgttttcacagctgtaaggttggctctttgctttagctcatcagttctcagatgcacatgttttcacaataacatcactatactcaggatgtgtcctataaacagtggcacattgtagataagttggcagtgtttttctttagtgatacttaaattaatggtgagacttaaaattgctgacatcttagagtcaatgaaatatgatcatctgtttcattcagtaagctcctgctataataggcagagaggtcaacaaatgaatgacagttcagcgtgagtatgttagacttagcagaaggaacatgttttcgttgggagggagtgggtacccgtttggagggtttcaagaaaggttttctggggaagtagagtcttggctttgcatggaaggatgcatagaggtcaccagctctgcaggagatgagcctctgggcagagggatgttcccaaggaggagccccacctggggtggctcttgagaataagccttcagtggtcctagagggagccagggcacaaaggcagtactcagaccatgaaggatttggatgccaggctgaggatcttgtagtgtatcagtaggattcagtgaagagcattaggaaaatagtgatatgatcaggtttgtgcttctcaagtttagaagagtcaggctgggcatggtagctggctcacacctgtagtcccagcactttgggagactgaggcaggaggatcacttgcactcaggagttcgagaccagcctggacaacgtggcaaaaccccatttctacaaaaaatacaaaaattagccaggcttggtgatgcacacctgtaatcccagctacccaggaggctgatgtgggagaatcactggagcctgggagatcaaggctccagtgagccaagattgcaccatagcactccaaaaaaaaaagtttagaagattcactctgatggcagataaggagtggatcccagaggatcaaggctagagctagagaggccaaatagaagctgatgcagattaaagatgagagttgctgaaaggacagatgagaggaaattagaaggtggaattgactggactggggactcattggactgatggatggggacagtagtcagctaagacggttccctggttcttccttgggagtttgggtgagcgatggtgccaccaacaaaggtaaagaaaatagaaggaagagcaactttccaggaaaagggtggtgagttcccttttggacacttgcctgtgagatgtggaggtgagctggacatgcaggatctacagcccaaagaagactacaggtgagagtgaaaagcaagggagcctatgagagtggataggtgaaaaggagaccctcagggccattcagaagaacaccctcatctaaagaacagataggccatcgcggtggctcacacctgtaatcccagcactttgggaggccaaggcaggtggatcacctgaggtcaggagttcgagacctgcctggccaacatggcaaaaccctgtctctactaaaaatacaaaaattagccgggtgtggtggcacgtgcctataatcccagttactcgagaggctaaggcaggagaatcacttgaacccaggaggtggaggttgcagtgagccaagatggcaccactgcattccagcctgggcaacaagagcaaaactccatctcaaaaagaaaggataaaggctggcacagcagttcacatctgtaatctcagaactttgggaggtcaaggaaggaaggtcgcttgagcccaggagtttcccatcagcctgggaaacacggggagactccatctctccaaaaaaaattcaaaaaattagctggtttttgtggtgtgtgtctgtggttccagctacttgagaggccaaggtgggaggatcacttgagcctgggaggtagatcgaggctgcagcgagctgtgattgtgccactgcacatgcatgcagagatgaacagatagaggatggggagtcaggggcagaggctgcctgagaggagcagttggagaggtctgaggagacactgagatgctaagtgttggaggagcaaggtcagagagttgaggaggggagattgttgctgggacacccagtaagatgagggccaggaataacagtaggatgtggtaactggaaggtgttagataccttgatggcagtaaggagcttcagccaaaagtggaacagagccaggcaagtgatgtaggagtgaccaggagatgagacagtggggccattgtgcagctttaatatgtgggctcatggtagaattttagcagaaggtccctatctgcaaatttgccccgctgttatcttgtctgttcctcagtgtgcccttgggacagaataagcccatactcaggtctctgatcaggctgtgtcctccttgctgccaaattctggagaattccagctgagaagctttacgtcactcattccttccatactcactggcattccctgtgtgaggcactgaggggacagaggtaactacagtatggttgccacactgccctctcacctcccttcctgtgtctcctgcaggaggaacacctgaggccagtacagaatggagtgtggaggctgagatctccctaggctgataaaaagacagggaggcaaggcagcccaggagggggaacacagggctggatgagcacgggaagcctggctttgccactgtctgcaccttgacatgggcacttcctcccctgaggcaaggagactgcttgcccttgtagtgaggaccaaagccagcaacagtatgaaagcctcacgagagctgtgatgggcccttgtgcctgtgcaaggatactttgttccctgattaggggatcagccccagatgggccactgtgcacctctcataggggagggtgtggtaagccttcctggcctcccacccactaacccaacatgtgttcagctgtccttgctcagtttacgtcacttccccctcaaacgggtatgtgtttgtgtattgtgaaggcgggtttttttttggcttttttgggggacagagtctcgctctgttgcccaggctggagtgcagtggtgcgatctcagctcactgcaacctccgcatcgcaggctcaagcaattcttctgcctcagccttccaagtagctgcaattacaggcgtgtgccaccacgtccagctaattttttctatttttagtagagatggggtttcactgtgtttgccaggctggtctcgaactcctgatcttaagtgatccgccggccttggcctcccaaagtgctgggattacaggtgtgagccactggcacccagccacattgtgaaggttttttaatgaaaataaattcaaatcagttcatctaaaaaaaatttcattacctctgttgaatgtttggaaacacacagtgtggctgtgctgctgacattgttatgttgcactgtgcgcctctgagtcctatacaacaacctgcaattgtgacagctctgggtgtgacagaaatgggtgccatgttcccagctaccctgtgaggtagacaggaacacacagccagtatatcacagagcctggcatcccatcctgtgatcaggcctgtctgatcacaaagttcacctcgcttctcccctggttcctctcttactttgatcgtgctggagagagcaggaaaaagtttggttttggggctccatcaacaatagtgtctgtttctgcccaccctagggaagcttcctgcaggatccgcctgttccgatgtacacatggcgttgtgtgccgtgaacctggctgaatgtgcagaggagaagatcccaccgagcacactggttgagatccatctgactgctgccatggggctcaagacccggtgtggaggcaagctgggcttcctggccgtgagtacccttcggttcccttctgtaaacctcccctgagcacttacctagccaggagttaagatgcagaagcagttatgaacccccttccccatcaggtgctgcccacctggaggggtaggcaggcattcattcagtcgctcatttcaccaggactcccagcaaccgataaaacagaccaaaattcctccccttgtggccttaataccataagccttgtaggcaggacattttggtcccctgaggtaatatgaggtaatatgaagattggttcagcaatagcagagctactgtacttgggggttaatatgcaacttttctgttcttcaagtggtcataaaaattcttagaatcccctggttatgtctcatggttctttcatttactcagaaggtatttattgggcatcttgtattgatcacagcactgtgaatccagaaataaaagccagtgcctttgccaagctacagagttaaagaaaagaaaaatgaaatgaataaaagtaaaagaaaacctgtgcctgtctacaaggagctcaggtcagacgagggcagggattgtggctatcaagcacctcccatatgcctagctaggagccaggcttgggaactctcaaatgggtaattcccggtccttgttatcagctagctcacaacatgctgacctcaggctttctcttactctagcagaaacaggtatgttttactttgtgtcccactatggatagactgctgaatacatcaggtatgttcaagcattaccacatctctatttgtttccgtatctcagtaacagcagagatgagctgagaatgaatcagaacgtgccctgtagtgacattgatatatttcctgaggtacatcacgatagtctaggggacaaagggcgcagggaagcccagtgtactctttatgtctacacttgatcttagccagaaggctgagaagtgatactttttatgtcttacctctgtttctggtgactacagataagagactcatcccttgattcactcattcagcaaatatgactgagcaccgtctctaagcaggacatttgccttgtcctcagggagcatagttggcaaggaatctagacagcagcccttcttgagcttgacattgatcttctcatgaggaggactgggctccaggtggggaaagaaccccatcctcacttgtgggctagacgacctgggagtccacagacactgaagacacatcattcttcctattcatttcaaccttccctcgacagatcttcctgggaccaggtcttcaggacagtgtgagctagggtgagctcctgagctggtcttgggggaagtcagggtgggctttctggggaaggtgaatctaggctgacagcaggaggcattgatgagatctctctccttttcagtttattgaagtgctctgggctgatgtcattacatttgtaacttccatgccccccaaaaatgttttgaagacattcattttatcaaaatacaacatacatgcagaaaaatgcccacattttaacttacggcttgaagtgaagttacccatgcaacacccacccacatcaagaagtagaacattcccagcacccccagaagccttcttgaggccctccctgctcttcctgccccaaccaaggtaaccactcttctgaattctgtcactggagtttaatctgtctattgttcatcatttcagtaaacttatcaaagtacatgcttagaagtctggctgggagggccgggcacggtggcttacccctgtaatcccggcactttgggaggccaaggcgagcagatcacctgaggtcaggagttcaagaccagcctgaccaatatgatgaaaccctgtctctactaaaaatacaaaaattagccaggcgtggtggcatgtgcctataatctcagctacttgggaggctgagacaggagaatcacttgaacccaggaggtggagggtgcattgagcggagatcacgccattgcactccagcctgggcaacagagcaagactccatctcaaaataaatacatacgtacatacaaacaaaaattagctggatgtggtggtgcacacctgtaatcccagctacttgggaggctgaggcaggagaatcgcctgaacctgggaagtggaggttgtaatgagccaagattgcaccactgcactccagcctgggtgacagagtgagtgagactccgtctcaagaaaaaaaaaaaagattacaatatgcatgtcaaaaagtatacaaatcataaatacacagttcagtgactccacagagtaaacacacccttatagccagcagacagatcaaagtacagaaccaagaccccagaaacttctcttgggccctttgcaatcactaacctgccccttcccccaagccttccagccttccaagggtaaccaccatcctagtcacctcagatgctttgcctctgtttaaactatattaatataaggagagtcttgcagtatacactgttttgtgtctgacttattttgctcaatatcatgtgtaagaatcattatgttgttatgtagaattatagattgttcgttctcatatttatagtgttccattgtatgactagattattgcagatgaactttttagttgttttctggctttggttattatgaagggtgctgctgtgaacctccttgtacacacatctttcaggaaacgtgactgcatttttaggaatggcatcgctgggtcagaggttgtgcgtatttccaaattgttggccattctccactccatcagcagtgaacaagacttctagttctacatccttaccgaacacatataatgtcaatttttttaagcccttctagtgtatctcattgtagttttcatttgtacttcccaggtgattaatgagattgagcacctcttcttacatttattggcaatttggatagtctgtttcgttacattcaattcaagtcttacctctttttcatttggactatctgtcgtctcattgattagaggaattctttattctggagattacccctttattggatatatgcttttcagataccttctcccactctggggcttgcctgttctgtcttaatggtgtctagtgagagcacaagctcttaatttcagtgaaatccagattattagtcttttcctttacagttagacattttaagtcctgttcaataaatctttgtcctacctcaaagtcatgaagatattctcctatgttgtctgctagacgctttattttttactctttacacatatgtacctaatccacctggaattaatttttataagagttggaggtaggagtgcaagatctgtttttctccataaggatatctacctgacgcagaacctgttattttaaaaactatccttcccctgctgcaccaagtggcacctttttttcataaatcaaggatccgtgtaccgtgggtctgcctccagatctagtctgttccactgcaccatcaccacccaaccctaacggctgagttttctcttacgtcttgatgtctggaagtgttggtcttccagatttagtgactaacgatgaatcttgggtgtttctttgtagcctcttcattctacagaggtacttgatgctgctgatggacatttgggttgtttccagtatttgccgttataaacagtgctttagggaacatttttgtccattgtcttcatgcacctccataagagtttcctcagaccaaatctgtagagatggtgatgctgtgtcaaaggatataaatatttgaaacttaatagtattaccaaatttgcatattcagtaagatggaaaaaggagaactgtcatctttaaagtaactgctcttctctgtttacttctcttgagagaggataaagagactcagacagtactttcttataaaggaagaagctttgaatttggtgagatatatttagctacaaatgagccagttgttgggggcaagtggagggctggcctctgtgaaaatggtttagactagaggttcccaaacttgctcaactcatgactcaagattcccaaacattctctactcactatgtctcagtaaatttttcatggcatcccttagccaaaagaaatacctaacggttctggttttcgttttttgaaacagtgtcttgctctgttgcccaggctggagtgcagtggtgcaatcacggcacactctagcctcaacctctctgggctcaagtgatcatcccacctcaccctcccgagtagctgggactgcaggtatacaccaccacaccgagcttatttttgtattttttgtaaagtcagggttttgctatgttgctcaggctggtctcgaactcctgggcttaagcgatctgcccacctcagcctctcaaagtgctgggattataggcatgcaccaccgcgcctggcctctgttaagtagttaagtttgaacatcctaataggtatttaaattgtcttaacagcttagtggtcatttgaaaaaatcatatgtcaagttgaaagaagaaataatattttttgctaggagtggtagcacacacctgtggtcccagctcctcaggagactgaggtaggagaatctcctgaaaccacgagtttgaggctgcagttagctatggtcacacctgtgaatagagccactccactccagcctggacaacatagtgagaccatgtctctattaaaaaaaaaaaaaaagaggttgggcacggtggctcatacctgtaatcccagcacttaaggaggctgaggcgggtggatcacctaaggtcaggagtttgagaccagcctggccaacatgatgaaactccgtgtctactaaaaatacaaaaattagccagggatcgtagcacgcacctgtaatcccagctactcggaaggctgagacagaatcacttgaacccaggagtcagaggttgccgtgagccgagattgtgccactgcactctgggtgacagagcaagactctgtctcaaaagaaagaaagagagagaatattttggattcttaataatttcttagaaatcatggttattaagaatccaaaatattcttttatttatttatttattttttgagatacagcctcactctgttgcccaggctggagtggaatggctcttcacaagcatggtgtcactgtttcttaccaatacatgaacctgtcaagcactgcacacctcaagctttggaatcagactagcaaccatcactctctctcttttccacattgattttcacacagtactatgacagatatcacatctccaaaggaagctagtgtggtctcaatgctgaggctgcatgctctccccatctagtcacttacagtgcccagctgatgttgagcatcactgttttcctcgaaagtttaaaatagccagtggctcccttgatcacttgctgtggcacctcagactgccttggcacacgatttgagagccatggggttagaccgatgttaggggacacaacctggggttgggactggcccagggatactgagtggctctcaggatctaaacagttgtggggttcttgccacagcctctttcacatcaggcaattagcagatgagttacagggggaggctcctaggccccagttggggaagattctggtgtctataaaatttaggaaaacttaaaaaaaaatttttttttttttggcttgggattacaagccaagccaccagcgtggccaagatggtgaaaccctgtctctactaaaaatataaaaattagctgggtgcggtggcgggtgcctataatcccagctacttgggaggctgaggcaggagaattgctagaacccaggaggcggaggttgcagtgagccaagatcacaccactgcactccagcctgggtgacagagcaagactctgtctttaaaaaaaaaaagaaaagaaaagaattaagcttaaaatacatttttacttagtgatttccacatttgcctttctggttcctcttgccgtatgacctggactaggctttgcttctacttgtaacatttgggccctcgtgagggaccagttggtcctcagtttctcctggagcagccaccaggctcccttgctgattggacatgtggaattggctgttcttggaaagagagttggagtcaaccgttcaaatgttctgggacctccgaagcccaggaatcacgccaccaccccccaatctccctccctgctcagctcctcaactgctattctcccaccattgcagttatcagctcagattcagtgagtgctttgtggaaggttggcagagggtcgcgagggtcctctacatttgttctccagtatccagtatcaacactggttaccaaagaggaaggacggactattggtgcccctggtcccagtgattagaaatgtaagtgaaacaccccacctcatctcataagctgctttgagattatgagtatgtgtctatagaacaggttgttttctctcagactcaggcagtgtctccaggttccccctggagagagatagtcttctctgtctgtgtcctcgagtggcactctgacagtgctatttctgaccctggcattcaagtcttctgaagccgttacattcgctgatggctacttagagcccagtaaaggtcagaaccatcagactgaaccagaccatgaaacagcgctgctcctgtgggggcgagggctggggtgtggaagcgatgtctgcgggcctcggcctggcagccccgcccctgggctccctgggctttctatcttatgcttctccctccctcctgtcttctgtcctcagttcctcactcaccctggcctgtttcggggagtggttatgggttggaagtcatgggtgttagtgtgaaaataccctcactcaaaaagtgacagaactgaaaacgtggtagatggtattgtccctgcagttcttgtcagtggggtcctggaatgatgttatcccggcaagtggaggaggggcccagtgaccggggccctggctctttgaattgtcccacaaagaggctttccaggttccccctctgttctttctcgcaggctggtgttcacatcaggggctcatgcaggggtgccatggggtttctgtagggggccgcccttgcagggccagctttgtggggggagtctctcaaccacctgcacacagatacttgcctgtacagggcctgggctgtcctcccagctgccccttcactccagtgccatctgatgtgaccctgacggctggccatgtgccgagcactgttctaaactttacacgcaaagtaaaagtaaaagaaaaattagtcaaagcagaataattttgcctaaaatagtctaaaagatatgtaattaaaatgacatgatgggccaggcacggtggctcacgcctgtaatcccagcactttgggaggccgagacgggcggatcacgaggtcaagagatcgagaccatcctggctaacacggtgaaaccccgtctctactaaaaatacaaaaattagccgggcatggtggcgcgcgcctgtagtcccagctacacgggaggctgaggcaggagaatggcgtgaacccgggaggcagagcttgcagtgagtcgagatcgcgccactgcactccagcctgggcgacagagcgaaactccgtctcaaaaaaaaaaaaaaaaaaaaatgacatgataaaaagtcccaggatagaaggggctgcctggcttggcactctcggggccgaggggaaagtacagcagccagggggcccctgagacccctccttgggaaaccgccttcctagtttaccctgcaggttgaatgccagtaggatcaggcagccccagcaggacaggatgcagcaggggccccacgcgtgccttgtggctgctccctgccctcctgctgggatgtggacctagtcagcaagtccagcacactctactggtgggcttgccctagtttccatggtgggctttactttcaggtacctgtgggagtcctatccctgtgctgatctttcccagtctcccccaaagcccacctccaccatggtgctttctgcaccccacagtggctgcagccagcattctgccaccttggtgttacccctggtccttgtccttccacagagctacttcctcagccgagcccagagcctgtgtggccccgagcacagtgctgttcctgactccctgcgctggctctgccaccccctgggccagaagtttttcatggagcggagctggtctgtgaagtcagctgccaaggagagtctatactgtgcccagaggaacccaggtgagaataccttggagccattcagaattggagaaagccatgcaaaccgccggtactacagagtcactgcaccagacacgcggagacacgggttgtctcttaatcttgttgagtccgtttgtttgtttgtttgtttgtttgtttgaaccaaagctcagggaggttgagtaacttgcttaaggtcacaagcctgatcagaaattgtcagtggctaagctgggtgtgcagctctgctctctctaacattcagagcccatggtccttacatcacacagcaataaattgtgattaagctccaagggtactcttagcccttgttttgggcactttggagacacaaaggatgtgtgaggcttgctttccctggcctccaggtctctcccattgggagagcagacagacataaatggagagtttgggaacaataggtggcaggcagtcatcaactgctcagagtggtgacagggacgaggcttcaggcattggaaggaggtgctggctttctgtccctggcatttgatagtgattggagttgactcgcccggccttggagcagtagaggctggtcaggattgacttagaccttgagtgctcagtggctgtctgctttctgctgtacttttcctcccctctcagaattggagtctgtggggagagtaaggttctacaggtataggggtgtgtgtcacacattgggggagttcactgtccttttcttttttaaataataactgtattgctcaacgtgagaattgtgtgcaacaccaaaatataaaggatgaaagcaaaagcaatcctaaatctttctaccccacccctgctggctaaacatggacttctcagtggctttgtcatctctggcagtctctggctccaggccttgttacttggaatgtgttcataagtgtccctcctcctggtcattagatcgaggcccacatatctgccacatgtgaggagagagaaggggctggtgatttgaggcctgccagtaaagaaacttgctggtgacagtcagctatccaagcattgcaaggccccgtgtctagccagttcagacaggtcactgctgatggcacgttccatgacaaggctctggaaaaaccggagcatgttcttcgttgtcatgagcgtggcagcagctaccacctttttttccttgcctggtggttctccttagccacatggagaagagaaatcctctgagacattccattttctgttttctgatccaactccacctgacagctcccaaccttagagtactgagcactgtgccaggagacacagcaccctcccccacaccccctccccaccggagctcatccagaactagtcttgagctcttcaggctgggagtgaacactctcccccatcctccaactgtttagcacagtagttctgggctttggtggagaaggggcatctgatccccattcacaaggcatggctgtgtttggagtttctctccgtaaagacaaagtgggctcataaatgagctccatttaaccccccttgcctgtctcttttccagctgaccccattgcgcaggtccaccaggccttctgcaagaacctgctggagcgagctatagagtccttggtgaaacctcaggccaagaagaaggctggagaccaggaagaagagagctggtaaagtccccagaccagtccccctgccttaggacctgtccacgcaggcaactccaggacagcctgaaggcctgcactcctggagggaaacaagcctggcatcgggttggcagggcaatcaaatggttcctttgtatttaatttctcaaaaatgagagccctatgttaactctgacctggcctttcctcctagaccaagtgcgttttttttttttttttggagacggagtctcgctctgtcactcaggttggagtgcagtggcgcaatcttggcacactgcaagctctgcctcctgggttcacgccattcttctgtgtcagcctcctgagtagctgggactacaggcgcctgccaccatgcccggctaattttttgtatttttagtagagacgaggtttcaccatgttagccaggatggtctcgacctcgtgatccgcctgcctcagcctcccaaagtgctgggattacaggcgtgagccaccatgcccaggcctttttttttttttttttttttgagatggagtttcgctcttgttgcccaggctggagtgcaatggaccagtctcagctcactgcaacctctgcctcccgggttcaagtgattcttctgccttagcctcccaagtagctgggattacaggcgcccaccaccatgcctggctaatttttgtacttttagtagagatgaggtttcaccatgtcattcaggctggtcttgaactcctgatctcgggcaatccgcctgcctcggcctcccaaagtgctgggattacaggcatgagccaccacgcctggcaggtgcacccatttttatgtatccctttaccaagcggagtcagtacttggaccaagtcagggatttcattagcttgctctgctttttggggtagggagcaggggcctgttgaaaggggatgggggctgggtgcagtggctcacgtctgtaatcccagcactttgggtgggaggccaaggtgggcagatcacgaggtcaggagatcgagaccatcctggctaacacggtgaaaccccgtctactaaaaatacaaaaaattagccaggcgtggtggcgggcgcctgtggtcccagctattccggaggctgaggcaggagaatggcatgaatccgggaggcggagcttgcagtgagccaagattgcgccactgcactccagcctgggtgacagagctagactctgtctcaaaaaaaaaaaaagaaaggggatgggaatgaaatgtgacgagctcagcagaaggcagacacatctggcctggacatcttggggacccagcccctcatggaatgtgccgggcaatttttctctctgacatacttactgagcacagtccttctttcacagagtaagacctgagaggcagataggtgccaaagtcacttttgttttttgttatttttgtttgttttttggggggttttttgagacagtgtctcactctgtcacccaggctggaatgtagtggtacagtcttggctcactgcaacctctgcctcctgggttcaagcggttctcctgcctcagcctcccaagtagctggaattacaggcacgcgccaccatgcccgactcatttttgtatttcttggtagaggcagagtttcaccattggtcaggctggtctggaactcctgacctcaagtgatctgcctgccttggcctcccaaagtgctgggattacaggcgtgagccaccgtgcccggccccaaagtcactttcctacaaggcccagatcctgattagggtgcacctgaggagagggggagggggcagttctgcctgggagataagaaaacttttgggaggagatgacactggacttggggcttaaggagaggagtgagggtaggctgtgggggatgctagggaaaggcccccagtagagggaagagtgtcagtgacagcccagagacacggaggaaggatgcctgaggaatacaaagggtacacatagacagcgcttgcgtgtgcctgggatgacaggaaagggacagaaatggccattgggtcttagagctggagagctgaacagctaggccatgaggtgggccttgtgtatatgttttgatgtacatgggaccctttcttttcttcctagtgaattctccagtgctctggagtacttgaaattacttcattcttttgtggactctgtgggggttatgagccccccactctccaggagctccgtgctcaagtccgccctgggtaagcacctgcgggtggcccacagtctcagggtgctcagttcaggtcttcacagtgcttttgccccaggggtccagggcgttaggagtgtagatgccagcatcttctctggatcccaggttcatacctgtggctccagttcacagtcaccccctcccaaacagcactcagaggcaggaaactatggttttcagagaagtagggcaatgagtaattgaatgtcttcctcaagccctagctgtgtgacccaggtgaggacccttcttaatgcccagaagaacaagcaatgagtggcccaggcaccagggatggtggggagtcacctttcagatgcacagtggcccctgaggcagctcttgggccttatgctctttgctgaagagacttttcatctgggcctctctaccactcctcagcccctcatcacatcagtgtcacagcacagcccactgactggattgacatcatgacatttctttgcttctgtccctaaactgccatcaggatgatagcacatcagctgccaactcttgggcttctgtggccaccctggaagatgggggtaccaagctaccgctggtcactctccctagggagggagggatcccagaaaatcagccaccctatcatgatccctgacctgtggcctctgttttcaagtttagggaagcatgaccatccccgctggttttgtgggatcactactgtcatcattttgcagttgagaaaactaaggctgagagaggagaagacttaaaatattctaacaggagcctgttccagatactttgaagataccattctttatggctattgaaagcttaggttgtatccatctttttatttaaaaacaacactgcagtcaaatatgtgttaaacttttttctctctaagccagtttcattatgacagactgccaaaaatgggattactagcttaacgggagtgaacttttttattttttttgagacggagtcttactcttgttgcccaggctggagtgcaatggcacgatctcggctcactgcaacctccgcccgcaccgaggttcaagcgattctcttgcctcagcctccctagtagctgggattacagtcacccgccaccatgcccagctaatttttttgtgtatttttagtagagagggggtttcaccatgttggccaggctggtctcaaactcctgacctcaggtgatccacctgcctcagcctcccaaaatgctgggattacaggcgtgagccaccgcggccaaccaggaatgaacatttttaaggctcttgatatatattgccaaacactttccaagattgtgctggtctattcccctcccccagaatcctgggtgtgggagcccagaggctgctggcccgttcccagcaggcaaagatgttacccatctcctaggaaggaagtgtagcagcctctgagcgccacaggtctcgtttctgtgggtgctggagtgcgtttggtgctgttctcctctaggtccagacatcatctgtcggtggtggacgtctgcaatcactgtggccatcagctggctccagggagacgatgcagctgtgcgctctcattttaccaaagtggaacgcatccccaaggccctggaagtgacagagtgcgtaaccctccttggccactcacttgcttctctccaggggaatcttgtttgagttagcaggagcaaactggactgggtgggcgtgttggggtgaagggtcaggactgcatgacaggtgggcggctagaaaagtcgggggtgagggcaccatggagaactcaagttgggccagcaggtcctctgtgcaagtgtcctgctctgcacaacacgacagttgtcccagcagctgtcagcactgtgtccgggtcctcctccctgcagccttcatggcgccacaggctgaaaagaagagacgagagcagtgtggcccccagcatcttcagaagctttgtggtggaggcaggcactggtggttcacaatcagtgcagagaggccactgttgcccccaaaactcatgtgcactggagcatcttgcccctgtgtgctagcattttatccactttccttccagccacctccacccccaccatcaaccctggcaactttgtcctgtaactaaaatagcctttagcacatggcataaccggagagcttttgacattcctctttggagattcatgtctgcgtcttgggggcattcggcactagtgatgggcagccctgcctgctgactccccggctgtttctaattggatctgagtattctaagagaaactgtaaaatgctccaagacagaaaggccccacgaggtcctatccttagagccaaggctgtagcatttcctatcaagcagacccttaaccggcgcacaggaaggagctgagaagagtgagtatacacaggcttgaagtcctttgttccctgaagtagatgtgacaccctaatttcattgaagtagccccatttgtaagcactctgactaggtaagcacccagcccggtatagcattccacctgtatgtgtgtctcccccagtcgatgtgcctgaggacactgagactcagcaggtaagttgtccaaagtcacctcgctccagagcagcagagcttccatggacagccaagacacccctgcaggcactgctgcctgctggattcacttacccctgggtccctctgcttttcagggactaggatgctatgagaaccctcccccatccctagcctccccttccactcccagtctcctctacagaaagaagctaactaagtatctccagagagtttaataccacatctctgggggggtggtcccttaaagaacgggtacaacaccttattgtggccactttataggtaaggaaactgaggcacacgttggaatgactatcttgggtggcttcttagcagcagacgtgatggtgaagcctgtgtctctgacttccagcattgaatgaaggtgctaaagggtggggcgctaaccctagctcagggctggcatttcagatctggagctggtggcatggtgccatagtggcagcattggagtcaacagatgcacatgtcatatcagtgtggggcgtggcagtcactggcttgggcccctctgcctgtcacgcaggtgacacatagtgacctgcctctcgactccctgtcactgctgcaggagccccctggtgaaggccatcttccatgcctgcagagccatgcatgcctcactccctgggaaagcagatgggcagcagagttccttctgccattgcgagagggccagtggccacctatggagcagcctcaacgtcagtggggccacctctgaccctgccctcaaccacgtgagtgggagctgagttggcccctgggggaggtgctctgcactggtttacgagaacactcccactcacctcatgctgaccctgcgggtggggccatccgaaagacagagaaaccaggacagcagccccctttcaaaaaagttacggcttattggcctaggtggactcctttttcatcccttttcagcctctgaggcaagtgtgtttctacctgcacctttcttaggctcccagagtcccaggtcctgctggcccatagcctctgtaagcccaggtgcaccccagctggccaggggttcacctgcatttgctccagcggtttgcgtgacttcccaggcctctgcaggcagccttggagtgggttcctgccccctcgggcacacaaacagagctgaagaccaccctgggcacctccttggctggccgcatacctcctggcgggcagctgtggtgcattgtagttgcattgcatgttctggtggtacccatgcaatgtttccacagtgcatcacagaggcctgcctggccctcgagagactgccctgactgaaggccctatcaggtgggggaggggatcctgatagagggcactgctgccactgttggggcccaagtcacagccatcccaggaaacaggagggcacccagctgaaagtggagcatcacctggtctacggggaacatgtccttagctccagagtgggagggaccgggagagtcctggagattcagattctcagccactccctggggcttggtcttagctggctaggctagtacttcaagctagatattgtcagtggacctgggcactgggatgaacccaggacagcgtggcagcccctacagggacaggcaatgtgcagaaaaggcccaaactggctggacgcggtggctcacacctgtaatcccagcactttgggaagctgaggtgggcagatcacctgaggtcaggagttcgagaccagcctgaccaacatggtgaaaccccgtttgtactaaaaatacaaaaataagccaggtgtggtggcatgtatctgtaatcccagctactcaggaggctgaggcagaagaatcacttgaacccaggaggtagaggttgcagtgagtcgagattgcaccactgcactccagcctgggcaacagagcgagactccatctttaaaaaaaagctggtgggggtgcccaaatgccctgggctgccaagaccaaaggcagatggtgagccacatttcaccttctcttttgggctttccattagtctcttccgtatttgtcttcatgagagaaccaaacagtacaggctcagtttggggaatgagaggcttgcagccaccctttggactggggttccttggtagcagctctgtggtaggaaagtgagcctagaagacaacgccatgcagcctgatggccctcggagggcagaatccagacataggcctgctgcctccatgcccacaggtgcttctgcagcatgcacagcttagaagtgccaggttttgaggagagggatccttttccacatccccttgaagcacacaacagccagaaaacagtgtaggcaaggatcaaggccttgtgcagggacagggcagggtcttcctcaggcccagtgtcctgggaaggaggaaagccagggctgggtgagatgaggctcagcctgagggagttcatcaggaccggagggctgcttgcggcccatctcaacaaggactcctcactgctcggtgtcgtgcaggtgtgccactgcgagccgggtgggcagcccagccccataggtcgtaggcagagagtatgcatggcccacatgcagtaccttctcatatgatacaacagccctgtgatggtgccatttacatttttttgaatgaagaaactgaggctcagagagactaagtcctatgccagggtcatgtagctagtaagtggcaaagccgggtcagtaggcctagtccccaagcactaaggcactctgtggttctgtcttctgagacacctgtctccctctcccactcctcctcctccttcccccagccccatcgacaggctctgctgccacttcaggcttttccttggtaccttgtgggtatctcagcctcctagccagccatggtgggactcccatggggtggaagaacctgcgccttcaacccacaagggttttatttctgcccctgccacctgcctgtgctgtattccctatacaagctgctgtccctgtcagagccttgctttctcacctgcagaatggggagggcttgtctcccacctcctggggccatggaaggaactggttctcccctgagctgttccctcacgtcctgcggagttcaccagactctggggctctccacttcctcccagagctgctgagtgttggtctggggagaggcctggtaggtgctaggatccttgcctcagggatgggccagtcacctgtctcccctctctcgtggctgaccccacaggtggtccagctgctcacctgtgacctgctactgtcgctacggacagcgctctggcaaaaacaggccagtgccagccaggctgtgggggagacctaccacgcgtcaggcgctgaactggcgggcttccaacgggacctgggcagcctgcgcaggctggcacacagcttccgcccagcataccgcaaggtgaggcccagctggctggtggggcagggcagattggagcctgtggggcctgagcccagaacccagcatgggcaccagcatgtggttgtggagttggccctctgaggtcagcctggtgacctgtcgagcacctgcttggctcgtgcccaacactgggctaggcgccatgtgtccctgtgttcagcacacattggttgagtgcctgctgtatgcctggccctggagctcagcagggagcaggccacactttgctgccacagacaggggccagcagggagctgtgcctccccaggcacatgctgggtgggagggctctgagggcaatggtggcaagtcagggctcctggcctggtcccgagctccacgttgactttcattctttttcacagtagctagaggcttcggttctgctgctgggtaacatccccttggcagtggccacgtgatctgaactaagtcacggaggaaagttctatgactgggcttgccaggctccagctatttccttttttgtttatttgtattgctatataatgtattcaacatatttgtacctgtatttttttctaaaaatttgagtgagatgactcaagtgtcattgagggggcacgggctgggctggaagaaggcctcagagcgaggctgctgccgtggagcttgggattcagcccccacacccatcaccctgaggtgctgcggggcccacccagggttgcactgtggccactgtgtgcagcaagccaagacagacacaacagacagtatcatcggagagccattccttactgtggagaagagggcatgtaccccaggcctggagcggcacccctgcctcctggagcccactctggtcagctctctggtctgctcacagcatggctggcatcagtggcctttttttcataatagatggggtcttgctatgtggcccaggctggtctcaaacccctagcctcaagctgtcctcctgcctcggcctcccaaagtgctgggattacaggtgtgagccacctcgcctggtccaaaggcctcctcttaaataccatttccattctgctgctccctgctgagagcccatcagcggctccccattgcctaccaggaccagaatccacttggcagcactgaagaccctccctgaagactgagatataaaggcatcaaaaagagcttgagattttaagaaatgacagacctcagccttgcccttcacccaccagtggctcatacctaagcgctgcagactttacccgcacacctctagactctcttcctttctaaagatacggaaagaggataccaaacctctctggtaccagcccaactgtccctcctcacccctctgtccctgtcacacctgtccttttgtcaaactgcaggcagcctccagggccttggggcttcacccagggcacttgtctaccagccccacgaggtgcgtccagggctttcttgtcaccagttgggaaaagcaggccttttgcctctctctcctctcatcctgctcctgctgttcagccaggtttcctgcctggctcagggtcagagtacgggacaacagaggttgcttttcaggggtgagcaaggcagggtggtgtgggaagggatgtcatgaggtggcaggcgagatggctcagggagagctaccctgggcatagatgggtggggaccaggggtgtgatggatgtcaccccggcacctccccaggtgttcctgcatgaagccaccgtgcgcctgatggcaggagccagccccacccgcacccaccagctgctggaacacagcctgcggcggcgcaccacgcagagcaccaagcacggtgagtccacccctccccagctcacaggctgggccaggccctgcgccctaggaagagaggagaagaggggccagcccagctcccacatctggcattggtgcccagcacacctctcgcctctctgagaatgaaagaagcccgaggccgcccttggtgggttgcaggggttggggtggtcatgggtcatgctgtgatcagggaaggagggttggggtggcgtcccagcacaggtgcaggcatagaagcagaagctcgagccaggtcatgtgggcccatctcagccccaccacgggctggccgtgagaggctggacaagttcacttcttttccgtggattgggtggggcagcagaccccacctcccaggatggatgtgagcgttcagtgaatgagtccaggtaacgccaaggaactgcaccaacttcatggtagattctcggttgtgacacacatctccttcccacaggagaggtggatgcctggcccggccagcgagagcgggccaccgccatcctgctggcctgccgccacctgcccctctccttcctctcctccccgggccagcgggcagtgctgctggccgaagctgcccgcaccctggagaaggtgggcgaccggcgctcctgcaacgactgccagcagatgattgttaagctgggtggtggcactgccattgccgcctcctgaccaccaggctcagcccacccctccacctctctctcgatttctctctctccccctcagcatcttcccgctgagagtggtggggaagagccttgtcttcttagctgtcacctgccgaggcttctgggccactcaggccagtgcacccctgggcagagccccttaaagctgctgtcactagatgcccatggtccagggcctggtgggcgtgagaggataggtggcagggcagaaactgggcagccctgacttgatagcagcagggggagctcccaagctgccaagcccctgcctccagccttcctgagtttctctctcctgaaccctactctctcctttttgcttcctcagtttttatcaggctttctctgggggacagcagtctctgagcaccagggagcagttgccctcaggcctgtgcccagcatgccctcccctttttatacgaatgttttctaccagtgtgcttgggtttgccatgatgcgaggctgagttgctgtagcgtcttgattctctccctgggtctgcgttccctcccctgggcctgactgagcctgctcattgtttttccctttattacacaggacagccaggggaggaggggggcccagccctgggaggctggtgggaggcagggggcaggcctgcggatgcatgaaataatgttggcattattttttaattttttaaaaaataaatggtatcttatttaattgtcctgttccttcccactccccgcctcctaggatgttagcccaagctcagggtaggcccagggggctgggagaaatgaagccacccatggggactggggaccaggggccttcagcatggcttctaggttccctcctccccctaccccatctcctacctccacagtacagactgtccccaacttaacagtggttcaacttaaaccatgtttcaactttacaattggtctgttggggtattaaatgaatttgtgacttaggatattttcatttatgatgggtttatcaggaagtaaccccatggtaagttgaggcatatctgtatatatttaaacctaattaattcttgagctgaaaataaataaaccaggatggcagggaccaacccctaatccctccccagcggcaagcccctcttttcagagtgggcagagggttgcctatggtgggcactaggaatgaggtcccctgcctcgatgcgggtcctaggagaaaaagtcctacttttctgggtccccaggtgcagcacctcccggagactgtttctcccatggcctcctgagtgatgggccctgcctccctgtgcctcatcctcaggctggttggagcagagggtgggcaggagccccagcacagactggggggtgctcacagcagggccaccttgatgcaggctggaatgttatccctggggtgtgcttggaccccacctgctttctttctctcctgcccctcccctactctcactgtaatttatggaccctgcccgcctgcgtgttgtgtgtatgtcctgtgccttttctcactattgtttgggtgtgggagggggtggtttttcactgaaaaggggggtacacctatagctttcttgatgttcaatcaatcagtcactgtgtcccagacatattcaataaacacagattggtaccacccagcacgaggtgtgtgagggtctgtagtgcgactgctgtggtgcccagccaaggggctgcgtgacttggcaggcaatgggccagggactgagggcagccccccaactgctgagagggcccctggcttcagtctaatgggcctcccttgtccaccttccttccggtgcctggcgcaccctccagcctgggataaaagggctgtgggtggcactttgggggtcagaggtcactgtatccaggttccagcttgttccctggatgtaatgcaggctggctgacagatttggggtgctgaccctctcccccactgggtaaactgctccttagtttctccctccctgaagtcagtgatcctctgagccaggaggctcactggcccacaagtcagatccaagtccaggtcctgtgcttcccagctgggtcacctggggtgggacctggcctcagtctccacttccacgtgtgcagaattgggaagctaagctcagccatgaactgcagctccaaaggcttgtctgccaggactgagtgatgggatgcaagtttacagcgagtgccttgtgtggctggtgaggccaggcttggcgtaagacacaccaggggacaggaccacagactgggatgggagtgctgggcctcgtcgcaagaggagtcaggatgtgactgagcatgtggctgaatccctcagctatgagccacatccttctctgaagggtagtcacagcaggctaccctgagaccagagcagcccggtgaggcccaattgcagctggtcccgtgcacagctccatcattttcagggatggccactgcccacagcctcagcctggctccactgggatggagatccagggcccttggaactgagaatgagcagggggaattgcccactcttggcacagcccagcagggggtgggaggtggggtgagaagcaaccagattcctttgtgagtctgtgtaggctccatgcctcagcccccaccctcctccagctctgcacagctgtgggacaggggcaggaccgtgggcccagagctctgtcctggtgcttctaggccttggtttccttaacagcctaaagggacagggaggtggaccctttgtggcaggagcggagaccgggcctggtgggttctggggcctcagggcagcccaaccagcagaaggaaagctccagactgtttatatataccctgggaacagggacccctccctaccaaccctcagaaccctccctcccagccaaactgcctgttgcttgccattccagccgattcacagcaattcgggagagtcctaacctgggagtctgctgggtgaccttgggcaagctacttaggtttcaaaacccaaatttcctcctctgtaaagacacacccacttgaggcgcttgtggatttcctgagaaaggccaacaaatggtggccattgttcttaaaacagtacaccacacttcaggtactcaggagggaaacagacccacctgggtggctttgctgaggtcacacacctcaaccagccacagccctggcccctagcctccccacatcacacacctcaaccagccacagccctggcccctagcctccccacatcacacacctcaaccagccacagccctgacccctagcctccccagtgttacctggcggagaggaactctgtggaagatgcacgcagactgctagcagtgctctggaccacagccaggtgcaggaagccctcccggagggacactgccagggaccctgctccagcttttcccccatttccttcagagaagctcctgggaggaggcgcccccatccggagcaccagatgtccacacggcccacacccattaaggggggtagcccggggccaatctggccaagcgacctgcaggccaggggctggcccacagccagtggtcagtgagcatcagccaggttcagccaactcaagctgcagagtggcggctggagggggctcaccttcagtacagggcatggaccccccactgggccttggacccaacagccctctctcctgtgcccgggcctttctatggctgaagtctaactgttccctctctcccagggctcccacgggggtgggcattaaccctgacattcaaccctggcccccctctccagccacttccccctggctctggccggtgcactggagcagtcctccaaccttgcactcgccgtgccctctgcctgcactgccatctgtacagtcagtgaccaatggtgcctcgcagccacgctggggcttctttattctcaggggcaggaaccacataaaagggcttatttacaagacgaacccgcggcctgcaggctccaagacaccactgccgttgaggcagacagaagagctggccttacggcaggcgctcctctccctgtggcctgaggctccgacgggcagacaggaccccagcccatgcctcgagggcaccgcggccccgcttcacacggtgacctcggtcttgctattggtccttaggtaccgggacccgcggcccgcgctgccgtaaaggccggggagctgcgggttgaaggtctcaggcatcttcacactgaactggcgccgggccgcgtgcccgggtcgccggggtacctggaaggcccgagccgtcgggtggctgagcggggcgggccgggccgggcgactggaggtccaggcggcataggggcccggcgcggcagggggcgcgtagaccggcggggcccaggggcaggcgtccagcggcgcaggcaagtccggggatggtcgcggagcccgcgccgggggttgccgcggggacggctcgagggcggggaaacgctgacagaagtcccgcggggcggcctctgcggggacagggcagggaagagtgacgccgcgccgagcacccaagctcaggactggacaaggggtcccggccggggactgggacggggaccgggccggggcgggccgggggcggggcccgctggggcgagggagccgattggccgagcggcgggcgcgcggaactgggaatttggcgcttggagctgcggccccgcgcttcgcagtccgggagctcgtgcgcccaggtgccctgacgctgcccgcacccgccactcacctgcggccttgagcgcggcggccttgaacgtggcgtacttggcgtagtctggctgcagcgtcaggctgccgccgccctgcagccgcgggccgcgcgggggccccggggcggccgacccccggggcgcgttgttgaggcgcttcttgtctggagcgaggagtgagacgcggctcggtccgatgccccggttcactccgccctcgctgtcacctctccgtagtcctctccccgaggccgttcggtgagaacctgggggaccgttctccgggcgaggctgcgagccaagcctgtcttcgccgcagcctccagcgcctggaacagggcctggctccgagtcacgcgcagcggcggcggcagccagcccggggggtgccaccctcatgaacggctcgcccggaggcgacgctcgagccaggcgcggagtcctgggacctgctcccgccgagacgggggatgtctgaggaacagaacccagacggggcgtgggggctgccaagcctgcctgcctctcgagagacccagggggaggctctggagcccgagcctcagatcacagccccggccagcaaatcctgcatctggaaccttcctcacacatcacagccccccagactcgaggccgcaggacccgtggggggtccctttccaccctggcgagctggctggccggtcgggcccctcacccgcagaggccgcggctcatttccaccggggaagcctctatgccccagccgagggaccgcctctcggcctctcacgcccctccgcgtgctccgccgccgctcagccccgcccgccaccgactcacctgcgctgttgtggggggagccccgggggaggccgtcccccatctgcacctggacacagccacccaggggtgggcccagggtgggaggcagtggctcctgggggcccggctgcttcagaagctctgtcagcgccctgcggggacagcagtcaggggtggccctctgtctcccacctcatcaaaagccagccccggccaccaccgtctcaccgtgtggccctgggcagttctttcggcctctccaggccgtcctctccggtgctcgaaatcacgcacgagtttcccctcccaggcagtatctgccagcctcacctgtggccccaagacagctgcttcccagagcaggtcaggaaactctaatgaggctccccttccctcccctcccctccctggagcccactctcagggaccttccccaggtgagcctcccctcccaatgcgagctttctctgctttcctgcctcttctcccaaaaaactgctactcattcttcagaccccatcagcggcctcctccaggaatccttttttttaatttttttatcttttgaagcagagtctcgctctgttgtccaggctggagtgcaatggcgcaatcttggctcactgcaacctccacctccccggttcaagtgattctccagcctcagcttccctagtagctgggattataaggtgcctgccaccacacctagctaatttttgtatttttagtagagacggggtttcaccatgttggccaggctggtctccaactccgccggtctcggcctcccaaagtgctgagatgacaggtgtgagccaccgcgcccggcccaggatgccttatttacctgcctgcctaactgcccctgcagccgcggcttctgctgggacctgggataaagctgccatcacgggcatgaaggacagatgggtgacggaatggggatgttgggagaccccctggtggcagcccaggacccacaggctgtgtgaccttggacagccacctccttggacccaacacccagcccccacccagctgtgatgtgacagtgtctgcagcccagctgccttcagaacccggaacccatgattttctcccactcagcctgaccctccttccggggctagagcctcaaatggctgattcgtgaaggtcattcaggaggcaggacaccagggatggccgaggtttggcttcaggtttggtggcagggtctgaaaccatcctagtacctgcctgggctgaccttcctgccctgccctctccccagaggctcacctctgtggcctcatctctgggcaagcacctcaagctcctgtctccctgacagctgagtaaccaccacgcctctgggcctttgcacaaactctttccagatgccccgcccaagccctctgagaagccttccctggccttcaaccccaacacagcagaatgaagggtgagactcgaggggaggacagggactcaggacacacccacacacaagcctacgtcccattccaggtctccccagcagagaaaagggagttggggccatgggagcctgaagcccagaaaggagaagggactggcctacaccacacagcacagcaagggtgggcatggctttcctgcggcatcaccaaacctgctgccccatccccagcaggtgcagggagttcaggatgaacatgtcagctgggctgctgcagccacccctcaccatcgcagccctaagttcctttttccccgcccctgtcaaagacatatccaggcctcttccaagctaccctcacccatcatgggggacccccaaatttgggcagcccagcccctacccctgcagcatccagaagccaggccaggaggctccacctcctgaaggcagtgcagaagctgagggtggaggccagggtgccagcccgggcttcccttagagctccctgggagaaagtgggctacgtggtttcgggagcgaggggtgctgaagtgccaaggaagccctcaccccctgcctctgaggcccaggagggggaagtgtccacatctggcctgccagggtatgaaggcttctctatggtcacttttaaataccagcctgtcacattcggtgtcagcagcccacaggcccaaagggtgctgggaccgggtggatgaggagggcacaggccccagggcatgggggttgctgggggcatgtgagtgccacgtgtggcatgtgggtgggagttccagggtcaggacacatagagtcctagagtcctcgttccaaccgaggaaggggacctggaccctgtagtgcccacttcacaccaagctcagaatgcaacaagcacctgtcctggcctcagcaacacacgactgtgttccagagtcccctttctacgcagagggagccctgaccttcacctgggagctgtggcatggggtgagtggggggaggcctttgaaacccaaggagggaagggcagccttgagtcacagctgtgggggcaggggagaggcaggaggtggaagaggggagggaggagtggggagaagcaggagatgggcacccagagaaccaagcgccccttcctttcccgtgcccaagacgcccggtcacctccctggccagcggcgccccttaccctggacagtgacccggtgccctctgtgcaaggctacctgtccccctcccagcccgcccccacccccctgccctccagaggagactcgagcagggaaaggcggtgcggcgcccagcacgggcagaaggtcaaagggagtcagggcggtgtcaggtgtctccctgatgaagtgttgggggggcggcggggggagaaggagacaggaaaacccagagaaggggcctgctgggagaaccagcgcttcgagagcggcgggaaggatcagcgggcagggagagcagtccgaggagcaggcgggggtccctgggcggcgcgtgctcacctggtcactgtgcgccgcgcgcgcgggctgtgcgccctctccagtcccaggcgcgccccgatgccggccagcaccagcagcgctgcgacgccgcacacagcgtagacggccgtatggctgcgctcgcggccggggtcccggggcgctgcggtgtcgcgggcgcgggcgggcggccggcctgtctggacccaggccggcgtgtcgtagttggaacagcggctctggtcgaggcgccgcggcccgtcgtggcagcagaagcggtagccgcacgtgccgcagcagaagctgtaggctccggagctgcagttgaagggcgggtcccactggcccatcacgtcgtagtagccgcggcagcggtcgcccccctccggggctgtcgtgccgggcgccgcgggaccctgcgcctcgggggctcccgcgcggcccgacggcggccgcgccagcagcaacgcgagccgaagcgcgagcgcgagccggaggccgggaggacggcggccgccgagcagtccccgcgccccggcccgcgccatcgggcccgcgcctcccgctactgcgcccggtgcatggccgggcgccgcggctccctccggctcggctcctccgctcccgcagggatcgcgctggctcccggcgcacgccgcctcggccgtcggcctcctctggggaccccagccccgagtgggctgggtctggagctccgaggccgcacctccggtgggcgcgtcctccgcccgggctcacctcggacccgagctgcccggtccgcgtcctgagatcttccccgggccgggcggcgggtcctcgcctgcgcgcggcccccggcttctccccggcccggcaggtgtgcgggtcttggccctagcggaggccgcgccggggccgcgggccgcccgactgcgctaccttcccgccgcgctctcagtacagcccgcgctctggctccggctccggctccggctcccgctcgggctcggcgcgggctcgggcgggcgggggagggagagaggagggagggcggaagggaggcagagccgggggaggagcgcggctgccgcgaggggcgagaggaggcagcaggccccgcggagccgggaggccccacagggaacccccctccacaaagactgccccgaaacattcatcggaactgggcgctcgaaggggatcagttctagggcccgcgactagagcgtccctgtcttacaggtgcggggacctgtaccttacaggcgcggaggtcaaagcagcccggaattgccccgggacgggcagggccaccctctcacctccttcccgtcccctctgtccgttctgatcataacataaggagggccccttcccctctcggcgcctcgattttcccacctgtcaaatgggaaggacttcccctggcagcgccgcttcagagggccaaggatttaccccacggcgcgagcccagttccagaacccctcgaacgctgggctggggtccagggatgtccccatccctgcgtcgatgggcacggcttggctgacgcacttccgcgatctgctccctccccaggtgtgaggagagggggactgggctcgcccctgccctggaaaaggaaagcctggaaaaggaagacctccgccctgcgcccacccgcaggtcctttcacaaaccgaggggtagggtgtgggggccctaaggagcccggacccggtcccagcacggcccagtggtgttttcggggttgagttgaactggagaaggtcctggtgcttggcttctccctgcctcagtatctcatcttaacatcaaagactcttcctggagggcagactcataatctgccccttccaggagataggggtcgatatggaacctccctctgtccagacggaaacagcaggagggcaaggactgggcgtgcaattcacccagtgtgcagctcaggcctctgtcggcatttgctgaatgaataaatgaatgaaaggactccagcgcctagtttctgtgagatgaaacatttggggctccctagggtccctcctggtcccctttccatccgtccttctctcagcaactgggaccagcttatgaaagtggagaaggtgggggagaagaagaggaaggatttacattttaaggaggatcaagtctgttgcctgacatgaggggctgacagactaatttcaggtattaatgggttcagacaggaagaggaggtgacctccccactcagagcttctccttgtgccctggccaaagacagcctgctccctccacctacacacacacatgtgcacacacatgtacacacacttcccatccagccccgaaaacccaccctcattaaaggaccccttattaccagtttagaagaaaaaacacagatgaacaaaggaattaaatgaaattgctttaatcccatgtccagagacaaccacactaaaatatgccacatttacatgctggattgtaactagtttgtggtttactttttgccatccttaaacttttcgtttggctgggggcagtggctcacgcctgtaatcccaacactttgggaggctgaggcaggtggatcacaaggtcaggagttggagactaggctgaccaacatggtgaaaccccacctctactaaaaatacaaaaattagctgggcatggtggcatatgcctgtaatcccagctactcggaaggctgaggccagagaatcgcttgaacctgggaggcagagtttgcagtgagctgagatcacaccattgccctccagcctgggaaacagattgagactccgtcttaaaaaaacaaacaaacaaacaaaaaaaaaaaaacaaaaaaaaaccttctcatttgtgattcttctcagagcttctgagctctactttctggagcgtcctttcctgcttcctttccttagggccattcctagaaatggaatccgtggcacaacccgtatcactggtattgaagtccccaccgccctctgcccactgccctggaggctgcaggagctctgaggggggcctcttctcccacctttcccacccgttgccgggcactgggttgaaagaggcttgtctctgcccccttggaactggggcctcttccaagttagagtgaggggtcagagcaagtctcccagtgctcccccttcctggacaccctcctgcccccaccgtcctggcactgggtgctttcctcatgttgaccccatcaggccttcacatacatatacatagtgacagccatttgtccaatgaaggaagtggattccagcccctcccagggactgatgtccaacccccaacaccaccccccaccccccaccacacacacaccttcctccccgtctcaatctgattcagtggtcagccagcagccataggtaaccataactactgggtctgtgccaggcactggataccctcttctctccatgggaacacctggccgcggggagtgagtggagcaggagagggcagctgtgaacacagagcccagctgaccctgactggctgagtcctgggatctgatcgcccattcagctgacactgccccaggtgcctggccatgtgccgggtgaggggatctggagatagagcagcccggccgaggagtgacccctttgccctggaccccggggtctctcaccccatcaaggctccagggcagccaccccttatctcttctgcctgcccccctccactaccactaagcctgtgtcaccaaaactcatccattgatccaggcttaaaataacccctggcatctgcagcaagccccgcggggcgggcagaggagccgagtccctgctcctgaagggcacccgccccgcccccagctcccaatgctggcagctcgagtgtgcgggtgtctgcgcgtgtttgggtgacagcaagagtgtgcatgtctggggctagcatgactatgagggccttccctgcacggtgggcatgtgtgtgcacacgtgtttgtcagcatacatgctcctgtgcacgaacggccttcctccatgtccagccctcacctggtgctcagttctggctggggaaggctgggggccctgagaggtgtggacatgacaaacagcctgtgctgggcctcagtgtccccattttaggtggtgggtgaccagtctgccagctctgctgagccctgggaaaggtttgggatttcctagagagaaactcaagactcagagagaggaagtgacttgctgtgactggcacacagccaggaagggcagggtctggcctggaacctgcactatgagtcccgaatccacattctggccagttcagcacacccgggaggcactcctaccccacgacagggcccttgccaacacctgacccaggctcatttgccccctgtctggtcacgcaggctgccctctcttcctggaacccctttccagccccacatgcccagagtttctaggttttatttatttatttatgaaacggagtctctctgtgttgcccaggctggagtgcagtggtgtgatctcggctcactgcaacctctgcctcctggattcaaccaattctcctgcctcagcctcccgagtagctgggatttataaggacccgccaccatgcctggctaatttttgttttgttttgttttgagacggagtctcacactgtcgcccagctggagtccagtggcgcgatcttggctcactccaacctccgcctcccaggttcaagcgattctcctgcctcagcctccggagttgctgagattacaggtgcacgccaccacgcctggctaatttttgtaatttttagtagagacagggtttcaccgtattgatcaggcgggtcgcgaactcctgacctcaggtgatccgcccgcctcggcctcccaaaattctgggattacaggcgtgagccacggggcccggcctaatttttgtatttttagtagagacgggggtttcaccatgttggcagggctggtctcgaactcctgacttcaagttatcggcccgctttggcttcccaaagtgctgggattacaggtgcgagccactgcgcccagcctttatcctttattttggagccaggctgaccgggttggaattcctgctcttcagggccattcaacctttctaggcctcagttttgtcatctgcaagatgggctaccagcatttcggcagggttacagggagaagcagtgggccccagagacactgaagccaggctgagaagaccgtgaccgcggatgccacccacaagcctccaaggcctcattcctaagctaatttcacttccatttcctcaatgatgcagttacccaagaagcagaggctcttggggactctgggctccctgctggtgcaaatgccgataccaggaggggttctggagggagggcccacggctgtctttgtctcccgcgaggcaactctgactcaggctccagctgcccgtgggagggagggggcgcccgggctcctgaggtcgccagggagcggcgggactgggaggctccaaagccctcagtgtacgtgcgaatccggagcggacaccgagaccttagcgcgggaaccaagagaggacagagctccacggaggccacagcgcgtgcacggggacaggtgcgccctccccggcagcccccctgctcctcggtcacagttctgtgcggaggcgtcttgcgccctcccccctgagcctcgcccttgagtcggggccgtgggccgcatccaggcccccagggctcgggatgcgcgtgaggacccggactcccgagggcgcagaggtcgggagcccgaagcaggcgcccttggccttggtcccgccccttatccggtcccaagctttttcctcgccccttggccttgactccaccccttaggcatgccgctggccccgcccctttccggccaccttgaggcttgggggtccctcagccccgcctctcttcttgaccccgccccttggcagcaccccctacccccgccccacgtccaaatctcccggggccggtggtggccggggctgacggcggaagccgcgcagagactcgcttgccccgaagtcgctggattcgggcctggatcccagattatccgcagcctaggggagtggagagatgcccaaggttcctctgggtcccgggaccccagtagcgtccctccccccgtcccccacgccaaccactgagcgcccttcggagtcccgggaggaaagcgtaggggcggggaactctggcatctctctcctcccggttgctccccgactctgccccgctattccgctatttggggcagtcgtttctaccgcacccccattctctccccaccctcgggtcatgagggcaggaccaggcctgctcacacctccctgctgggggcgttccctggctctagcaggggtccctctgtccctacatgccacaggacctcttcaatctccaaggacagctaggtgggcctcaagagccccattttgcagatgggaagaggggcccagagagttgaggcccagtgagatgctaccagcttgcagggatagtgctgtgttgagccatccctgctgaaacgaaagtggggggtcaggccttcctccctggcctcaccagctgggcctccacaacccctcctggagcccccagcctctggctaccaggcaggaagtgaaaggggcctgcaggaagccccaggaggaagcgagacttcagccaggcctgcccccaccggccagggccctggggacctggtgggaatcagaccctccttcaggaaaagctggcccgaaacacaggctcagagagaggccttttcccttcagttcccacccgcaaaacggcgcttccagagtctgtctgggatccctcttatcaaaatgagagaacagttggggagaaaatctgagtagtgatgaaaccagggagtggggcctggcatcagtccccgagttctccgctcccaaggagggggtccgggccaatgacattctgctgggcaggcatggccgccaagcgcaggagcccagggttcgcccagctccaccacccacctgttgtatcttgggccggatcccattacctcacagggcctctcttttcctatctgcaaactggaccatataatccctcctcatggatgtgaaatggtctagattttcaggagaaaatttggaccaacagggacctttaaaaaggtcaaggctgggccgggcacgatggctcacgcctgtaatcccagcactttgggaggccgaggtggacggatcatgaggtcaggagatcgagaccatcctggctaatatggtgaaaccctgtctctactaaaaatacaaaaaaattagccaggcgtggtggcgggcgcctgtagtcccagctactcaggaggctgaggcaggagaatggcgtgaacccgggaggcagagtttgcagtgagccgagattgcaccactgcaccccaacctgggcgacagagcgagactccgtctcaaaaaaaaaaacaaaacaaaaaggtcaaggctggctgggcgcggtggctcatgcctgtaatcccagcactttgggaggccaaggcgggcagatcacctgaggtcgggagtttgagaccagcctggccaacatggagaaacctcatctctactaaaagtacaaaattagctgagtgtggtagtgcatgcctgtaatcccagctactcgggaggctgaggcaggagaatcgcttgaacctgggaggaggagcctacggtgagccgagattgcaccattgcactccagcctgggcaacaagagtgaaactccatctcaaaaaaaaaaaaaaaaagtcaaggcctttggcgcaacaactgtgctgggaaacagagactcctgcacaggcgcatgtggcctgtgccgtcttggccacaacagcaaaaaccaaagtatccaaatgcccaggtggaaaaccttaccatgttgaaaactttattgtggagtctctaaagagagagaaacttaccaaatattaatatgatggtcaagacatgaatttgtatgtatagaatgattacaattatgtagaaaaatacaccacacactcgaggcctggggttactggacacgggtcatttcttccctgactacatcatggattccggtccagaacttccagattgtctacaaaatgcctatcttcatttttttcacaaaaaaaaatttaaacaaacacaaacaccccacccccctcctccaggtgctcttatgaagatcaaatgaggtattgatgtgacggctctgggtctcagtttcctcgtctgttaaatgcatatgagaattatctaaggttccttcctgcccttctctggggaccacaggccaggaggagaaccttgcatacaacccctcatttttcagaagaaaaaactgagaactcaggggaaacttcctaccggctggcggggccagctgggacagagagatgcccaaggtttgcatgtctgagccccagaggggtttcacccaccctcggggttttcacctgctgagctaaccctggctgtagcaaaagatggggtgggagatgggggtgtccaggagaagatggggtgggggagatggggtggccaggagaagatggggtggccaggagaagatggggtgggagatggggtggccaggagaagatggggtgggagatggggtgtcaagagaagatggggtgggagatggggtggccaggagaagatggggtgggagctggggtggccaggaaaagatggggtggggcagatggggtggccaggagcagctcagactcccccaactccagatggaaggggagtggatggctgggcccatgtgggcctgaccccaccaaacctctcccacacctactgcttgtcacttgacctcaccctgtcacctggctccctgggggcaggggcatctgagatgggttcatggagcaaatagccaggcagagacctggatgtgagtggccactgtcttccaagctgggcacacaacaggtccttgggacaggaagcactgagtccagaggcctggcaagggacaggaggggcaggagaagcaggggtctacaggtggctctggtggcagctcagggggaggcaggcagaaaacatctgatgcacagaacagaacatgcccagggcccaagagtgggaaaacagcacccagaactccaccttctgactcctagtccagtgctcccttccaaagatgctaagctgcaacaagttccaaggaagctgcccagggcgaagtccaggtcaggaggttctgaccctgtgcaggagggcaggtaggaggcggctgactgagtgcacagtgtcgtccaggagtggaaagagatggtcttgtccccagaccccagagcaaggaacaccattgtaagaggagggagcagcttccactgtgacggtgggtgaccagggggctggcacaggatggccaaataagcccagcactggggggccagtgcttcaggggaacaagccagagagagaagggagttcaagggacctcatgtccacctggttcaaggtcacacgcctgccctggcctctacacaaaggagcctcctgtaggtcccagcccttccatgtttatggctaaatgtgctgtgtcttggagcagctggaaccccaggtggaccctgagagagctacctgccagcatgttccttcagctcgagtttggagtccagccctggaggctgcgcacctcctcccaaatgcaggcttgtggctctggaagctgccactggggtcaaaatggcatcttaggttctggcagattgggccaatctcagggttgaccctggggtacagatacctgagaatcagcaaaatccagctcaatcttttctcctttgttatttcttaaaataatcttgtactaaatcccaaagcaagcgaacccatgaattgattattcactgctgccatttgcatcagtttaaaagcaggacggctctgagggcaggtattaaagaaatagaggccaggcccggcgcctcctgcctataatcccagcccttcggggaggactgcctgaggccaggagtttgagactggcctgggcaacataccgagaccctgtctttaaaaaaaaaaaaaggccagccacggtggctcacgcctgtaatcctagcactttgggaggctgaggcgggcggatcacgaggtcaggagatcgagaccatcctggctaatacggtgacaccccgtctctactaaaaatacaaaaaaaattagccgggcgtgatggcgggcgcctatagtcccagctactcaggaggctcaggcaggagaatggtgtgaacccaggaggcggagcttgaagtgagccgaaattgcgtcactgcactccagcctaggcgacagagcgagactctgtctcaaaaaaaaaaaaaaaaaaaaaattagctgggcaaggtggagcacctgtagtcccacctactcaggaggctgaagcagaaagattgcttgagcccaggctgcaattagctggggacccatcgttgcactccagcctgcgtgatacagcaagaccctgtctcaaaaaaaaccaaaacacaaaacaaggccgggcatggtggctcatgcctgtaatcccagcactttgggaggccgagcagggcggatcacgaggtcaggagatcgagaccatcctggccaacatggtgaaatcccgtctctactaaaaatacaaaaattagctggctgtggtggtgcgtgcctgtaatcccagctattcgggaggctgaggcaggagaatcacttgaaccaaggagtcggaggttacagtgaggcgagatcgcgccactgtactccagcctggcgacagagcaagactcgtctcaaaaaaaaaaaaaaaaaaaaaaaaaaaaaatcaaacaaacacaaaaaaccacccaactacaaattaggcatcctcccacttggtcttttttcagattcattttggcttaatggtgccttccccattttaaaagcggtcttttactcatagtgccccagccttttgaaggcacaggaacaggagctgggctaccaccttcaagggctgtcaaagatggtgaggtctgaagccaaaggcaagcacaccaaactccatgggggctgaatgctgtggtctgtagtgtctgtgcttctgcagagttagcctggtcccagaaagagggcatgtgcatgctggagtgaagagctgaatttgatttccaagcccctggctgggggtccagagggagggcaggggccacctcctgccggctccctgctattgttgctcagggccggccgtcttggtggtcaccagttcagtggagcccagctctgtggctggcacagggacactgtggccaggtggggtggttcctgggtcttccccaggaggaggccaggcaggagctgtggcatcagagattcccggagacagaatgatgaccttgtccaggggctctggggctgcaggcagagggggtagaggctccgtactcagtcacagccttccctccctcccctagaagactcctctggaggggcagtcctccgtcaaatgaagcccaatgcagggtggggaggggtggcacctggctgaccctgagtccagaggcctggccagtggggagctggcagggcagggagttggggagctggggctcagtctggcaaactcttcagggatttatgggggaaccaagctccgttagactcccaaagggcaggacagactcctccctcagacggggcccccttcctgcaacctgtctcttcctcacactggggtctgtcagggcagagctgttcctggctccgaccagggtctcaggggcaggactatgtctccctccccagcctgagctcctcagcgcaaactcttttccactctgtctccgtttccccttaaagcccttctctccccctcaggggccatgcatctccccctagaccgtcccgacaccccagcccctgcgccccgctcagactggttcccctacacacggaactcaccgtccttgtctccgtcgggggcctctgcggaggacgcgccgcgaagccgccgctgtcgccgcctccagctcaccagacccaccaggaccagcgccaggaccagtgccaggcccagcagcgcgggggcgccaaagagcagcccgggcaggggcagcgccgcctcgccggcccccgcgcccaccgactcctgcggctgcagcgccgtcctgggcgcagggctgctggccccggctgcttcgggaggggacagggagggaggccagggggccgaggggagggaggagcggggacggggaggggcggaggggggcgaggctggccggggaggggagggacagccggggggcggtggacaaggggagggagagaggcggcggtgagggccacgcggtgatcgcgggcccctccaggccctgcccacagggtcctttcagccctcggcgcccccgggggtcggggctctgcctgcgccctggcgatcggggccccgttctccccgcagctgccggcgccgcgcgccccgtgggtcccccttacccggtttcggccgcggcgtgcgcaggagcccgcaggccacgcagtggcggaccagcaggtcgaagcactcggccgggacgcagggcgtgggggctggcgcgtccctgccccgcaggctccggggccctcgcctcatggtgccgacgccgccgcacaagctgcggggactgaggctgagctgggctccggggccctcggggaggaagcggggggcggggggagcactctgccctgccccgcccccgcctgctgggtgggaccgagctcgcctggggcccccctttcttttctttttttttttttgagacggagtctcgctctgtcgcccaggctggagtgcaatggcgctatctcggctcactgcaagctctgcctcccgggttcaaacaattctctgcctcagcctcccgagtagctgagattgtaggcgcccactgccacgcccggctaatttttgtatttttagtagagacggggtttcaccatcttggtcagactggttttgaactcctgacctcgtgatccacctgcctcggcctcccaaagtgctaggattacaggcgtgagccaccgcacccggcctggcctctctttctacctgtggttccccaattcagcccctcaaccagcaccgcctgggtgggccctctgctgggtgctgggaggtgtctgggggcagaccagagcctcctcttgggtagggagggggatggaccccgcagccaggacacagaccctgagtggttcctctgctccgtctagccaaagcctctccatgaccccgagtgctcccctgccatctcccccaacccacctgtctcctcctctcttcctgcccttcctggacagagctggttggggatatcagacacctgctttttttttttttttttttgaaaaagagtctggctctgtgcagtggtgcaatctcggctcactgcaacctctgcctcccagattcaagcgattctcctgcctcagcctcccgagtaactgggattacaggcatgcaccaccatgcccggctaatttttgtatttttagtagaggtggggtttcaccatttggccaggctggtctcgaactcctgacctcaggtgatccgccctcctcggcctcccaaagtgctgggattataggtgtgaagccacagtgcccagcctgacatcagacacttgtaccaggcccaagtagcatgtgggtctgccctgagggaatctcacacttgtgctgatgggggaagacagcctcgcagcaagggcaccagctcacgtcatcctggaaggtgggccggaaggcttcatggagagggcgatggtgaagtgtttgccagatggactgaggtctagggagcagatgggggtgaaggccaaaggggagcaaaggcttggaggcccaaacaggaagtccagggagtgctgggaccgaaaggctggactggggccttatctagcacattagggagcttggactgtggctgggggacacgagggagccactggggctttgtgcagggaggacccaggaagatctgcctatgagtgagggaactgtgactgcagtggagggaagcccgcccacacctgctccttttctccagggctatgtgtcctctcctgctcacctctgtgtctcactgcgggcccctcctgtctatctctgctccccagtgtttggggtccccaactgtctgtcacccgtgtctctctcagactgcgtctcagaaacacacacaagcccctccgccctcctggtcacatgctaccccctccccagggccagggctggagggaactctgggagctcagggctcagcagagagcatggggttaaatgccacacatgccacccagacccctaagcactcagggctggggaagcacagtgagaggagaaactcaggggctggggagggagcctgggggcagagggagaccctgagcagcagcgagggggaggcaaacactccaggcggagggctgcaggggctaaggcttggagagatgaaaggggagcctgagctgctctgggggcaggcatggccactgccacaggggatgctgggagggaggagggagcatccgggctgcggatgggcagggcaccagtcccggggcagtacagaacctgggggtgtctgggtaggagggagattctgagctgtacctgcaagggtccctctctctggcactgtggcccacgtccagggcaggtggcccagggcaggggatgatgcagcggctggccatggagtgaggggagcaaggccgacccccaggtttccagcttgggagaccctgaaggttcacaaagaaccccagtcagccagccctgactggtgggcgctggcccaccctctccatcccctgtacatgggccagcagctcccaggcaggaaggtgtgggcggaggggagctgcaaaggagaagtggggctgggggcaggtgtgggtgagcgtgggtgtatggtgatgtgggggtgggggcaggtgtgggtgagcgtgggtgtacggtacagggatgggggacaggaccctggaggggagccagggcagggaaggcctctctgtgaggcagagaggtggggacaaagccagaagactgagccataaccctgccacccacatacacgtccatccatgttggtgctggtattacccattagtgagggctgcagaggcctgactgagtaccaggcagctcatttagcccttgtgccagccatgtgggcagactgaggcttgtgggaacccaggaacggggaacctgtccctggagagggtggcccagtgaggccagagtcgggagaatttacaggagttaggaggagggggtccgcctgccccaggtctgcgtttcacagcagaagcactggctgctctgacccccagcagagactcgaggagactgctctcaaggccagagagagtgggagggctggagcccactgtcagagttccagggtcccttaccttggccagagagggaggccagctgctaagagcagcagacacaaatgagacacccactcatgtgacacaaatgtttgctgggcgctccctatgtgctgggccaggtgccgggacaaaaggcctgcgggattcgtgtctgtgttgtgtgcaggtgcctggcctcacatgaacctttccacttgggcctcctaaatggggtgggggtggggggctgcagcaggccctgtgtcgctacttggatgacaaaacagttaagaagaattcacaatcagaccaatgtggggaatgttagtttactcctcaatgtattcttatttccccgtggcttttttttttttttttttttttttttgagacggagtctctctctgtcgcccaggctggagtgcagtggcgcaatctccgctcactgcaagctccgcctcccaggttcacgccattctcctgcctcagcctcccgagtagctgggactacaggcgcccgccaccatgcccggcaaattttttgtatttttagtagagacggggtttcaccgttagccaggatggtcttgatctcctcacctcgagatctgcccgcctcgccctcccaaagtgatgggattacagacgtgagccaccgcgtcccttttttttttgagacggagtctggctctgtcacccaggctggagtgcagtggcgtgatctcggctcactgcagcctctgcctcctgggttcaagccattctcctgcctcagcctcccacgtagctgggactacaggcacgggccaccatgcctggctaaatttttttgtatttttagtagaaatggggtttcaccatgctagccaggctggtcttgaactcctgacctcaagtgatccacccaccttggccaacacgcctggcctaatttcttttctttttttttgagatggagtttcactcttatcgcccaggctggaatacagcagtgcgataagcaacacccaactcagctcactgcaacacccaactcccaggttcaagcgattctcctgcctcagcctcctgagtacgtgggattacaggcacctgccaccaggcccggctaattttttgtatttttaggagaggtggggtttcgccatgttggggaggctagtctcaaactcctgacctcaggtgatctgcccactttggcctcccaaagtgctgggattacaggcatgagccaccactcctggcctaatttctttattcaagtcttttttttttttttttgagatggagtctcgctctgttgcccaggctggaatgcaatggcacgatcttggctcactgcaacctccacctcctgggttcaagcgattctcgtgcctcagccaccccagtagctcggataacaggcacgtgccaccatgcccagctaacttttgcattttagtagagacggggcttcaccatgttggccaggctggtctcgaactcctggtctcaagcgacctgcgcgcctcggcctcccaaagtgctgggattacaggcgtgagccactgcacccggccaccatgctctacttttaattcactgaatactctttttaaaaagataatttgggcctggtgtggtggctcatgcctgtaatcccaacactttgggagaccgaggcgggtggatcaccagaagtcaggagtttgagaccagcctggccaacatggtgaaaccctctctctataagaaatttaaaaaaaaaaaaaaattagccgggtgtcgtagctggcgcctgtaatcccagctacttgggaggctgaggcaggaagaattgtttgaacccggaagccagaggttacagtgagctgaggtcgtgccactgcactccagcctggctgacagagcgagaccccatctcagaaaaaaaaaaaataataataaaataacaagatagtttggggtcttcagagagaagggggtttctgtcgatttttgtgccccaattctcctgaagacaccctcacaaggatctgatgcaggtactattaggacattttccagatgagaaaacagaggctttaaggggcaagggccctctcaagatgagccagcagatgggaggggcctgcagggggtctgtgtccacctgactgtgaagcgtggcctgggccctacatgcttcagggacggggttggggaaagtgagagcactctggggatgggacaagcacagtgtcatggggagcagtccttggggacagagaggcccagtcccccagatctggatgtgaaactgctctggggcctgggatgcactctgtacttcaaaatcagttttcgttgtaattatgcagtagtacctgaacacgtgctcaggaaaaacctgcaaacaatacagaagtctatgagtgacaaagggcgtttccccacggtccccagagggagtctctgttttcccttgggagcctttcttcactgcctggttctgtgcctttgccccctcgtgtaggtgtacacacaaacagcttttcccgtgttccaggaatggggtcagcagtggagatggctctgctggctgggttgggcctgcagggcttcgagtcagctctcttggctccattttgtctcatgacagcgccaggaccaccccttgtggttatttcctttcccttctcctgtatttaaaagcccccacaaacaagtacaatgctacagagtacctcttgctggggccaggggaaaggatgcagtgccgtgggcctcggttcattgggagagggcagagtggccacggaatcagcacaaagtcctggcgagtccagagcagtgtgacccagaggcagaggcctgggagtccccagatcccgttcctccccgaacccacaccaggggagggcaggtcacgcccttccatgaagcagtcacaaatccttgcctgggtcttcatgggctggagctgcctgtcatccagcccgccactccatgcacacgtgcgcacacacgcgcgctcctgcactccacagggtctggccagggcaccccagccactctcagcatggccccgggatagaggacatgggccctccatgtgagactagagggcagaccacagccctttagccacagggagcaaagcccccacctcttgggggccaggtgtgtgaagtagagggaggctgtaaggccagggtaggcaagggggagaggaacgggggcccccagggccaacctcccaggccttattcagggtaccacgcaggaaggcccttgtgaacgcagaggccgacccctgcgcggatgcctccccgtcactcgccactcactcacttagcacctaccaggcaccaggagctgttttgggttctggggaaatagcagggaagcagagaggaaacccaaatgggacacaacgtagtgggtggggaggtaaggagtgctggggagaaaaagtcagaagggcagggtgctcgagggttatgggtgcaatttcaaacaggggagtcagagaaggcctggtggatggtgacctcggaacagaggacagggtggagcgatccccaaggatgtctgggggaagcagagaaggcccagtgaccaggaaaagggctgtgcgcaaagcatctccctacccggccgtctcctccctcagccctgtgtggggctagcacgactggtcccactttacaaagagggaaagcaggctagagtaaaggggcccgccaggcagcccctgagcctgccacactacacacatcagtggggtcctcttcccgtgtgcggacagcggcagggagagggggtgggggtgggggtgaggcccaggggtctgtgtcctcacagggaggctggccaagcatattggaggaggagggctgggggaccccttgggcctggccagctcgcaggggccccaagttcggctggcataccctttgatggaagagggcggtccagggaaggctgcctcctgtgcaggtccggggctctgggaagtacctacccactctccccagggagctgccctcagcagcccccagtccacagcatcccatactcaggtgggacccgcagacttagggtacacagcctggcagcccaccccactgtctccctcagcccccaagtgtgagacattctttcacagagactctctgcctgtgtccttctgaccccagggtacactggaggggaggggctaagccaacagaaccttccagaaaacgtccctttgtgctcgagccctgccagcaggcctggcccagcacccctgatgcgtgtgggttgggggcaactgtaacagggccttgtctcaagaaccccacggctctcctcgcccaccagcctgccagcccgtaccgagccactgtctgtagagggtggaagggctggcatggagtcaggctcttcagtttctctccaagcctcacaagacctgaaaaggggggcaggcagtggggcttggagagggaagtgggctgccccaagtcacactgcagatcagccacagaccccaagtcggtgggactcggaggctgctcctgttcccactgcaccacttcccctctgcagctgggctgctcctgcctctgctcaccgggggtgcaggagacacggggcccaggctgcagagcccctccttgctaggaaggtcctgcctccttggtagggatgggaaacaccatcagattgaggccaggacactcgggcctggaccactggccatggagaacgtgaactccctggggtcccaaggactgctcacagccaggtggaatgagggggacaaatgagtgtgtgactccgagtaagctctactcctctaagagtggggcccaaacaccaccttccttccagcttataagagcacggacggggcagcttccaggcccagctgaagaggcgccgcttccagtagccttcgcccccccattcccagcctgtaggcctagggggttcttgcccgccttcaacatcctgcaatgaccacgtcatgaccatggccaccctgaggcatctgacatttgtttaaagctttatgttcaaaataatgggcttgaggccagcaatttgagaccagcctgggcagcatagcaagaccccatctctaaataaatacataaaatagtggcttcttcattgccagtcctcaactagctaggaagaaaggcatcggttagcctggcgccacgctacagctgaggaactgaggcttgccgagggtgagtgacctgcctgaggtcacgccaccaagcaagcagccaagcccagcctctcccatctccctccaccttacctcagtaccaagccccaattccggcacacactgatcttccattacttccctcagccaaactgtctcctggacaatgtcactgggtctccagatggcgtgaagcaaccccactctctggccacccatcccccgccttccagggacagcaggtctgagggcacctgcctgccatttaagtgtggctcagctctgctgtgaggcaggggcaggccagcccccaactctagaggggaggcctcctggttccagggcccctgccaagctcagctgggagctggcggcagtgacagcactgtgttccccagtgcttggaaggttcccagactcttggctggagaatgcgatgccacttctcttgttaaatggtaccaggtggcaaggaaaatgtggcacagggacctgagagaggtgccccatgcgggcatgggggggagggggtgtgggggaaggcctctcctcctggtcgccagcaaaaagtgacatcccagatcaggcaggctgcatccacaccgccttcctcccctgcttggacacccattccatcagccccgccaaagacctactctaccctccagttaccctgcaaagacacgcattctggccaaggacagaagggccaaagacaaggtcactctctgggaaggctggccttccgggctctgctgctactgcccatcccttcagggaccaaagtgaaggttcacctccagcctcttccttctgccctggagcctcccctcctcaagcagaggctggcttccccgaccaagtgcccgaggggctttttgctgcgggcgaaggcctgctcaggcccagagcctgcaccactctgctcccacgctaagggcctctgccctcgggcctatcctgccaccccctgccctctcgcgatgctgtgttctagtggtcccatcctgaggcaggaaccatggcttgcagactgctgctttctggagcacacgggctgtctccaccttctgtattccagctcagggcctggccagtggagatgcccaaatcttttttttttttttttgagatggagtctctctgtcacccaggctggagtgcagtggtgcaatctcagctcactgcaacctctgcctcctggtttcaagtgattctcctgcctcagcctcccaagtagctgggattacaggcgcatggcaccatgctcggctaattttgtatttttagtaaaggcggggtttcaccgtgttactcaggctggtctcgaactcctgacctcaagtgatctgcccaccgtggcctcccaaagtgttgggattacaggcgtgagccactgcgcctggcctccaaacctttcttcaaggattaggcaggcacacagaaaaactggagagaagcagagtggggctggctctgctgccagttagctgtgtgactgtgacacacctcccatgacaacggtctgtttcatgaactgtgaattggggaaacatcatctacctcacaggtctgctgtgtgagaagagctctgtgaagcatgacgtgcctgcaaatgtcgggtgacatgtggggcctcgaccggaatctacgtggctgaagtcctcagcggagcccaagggactgccaggaagtcagccaggtgtctacaaacccttactgagcactaggggtggggcctgagctaagttccagaaggaacctacagaaaggggcagatagggccgcatccccgacacctacaaggagttagaaggcggcccacccctcagtgaagggcatgggcccagctgcgatggtgacatcaaagcagagaggccttaggccggccgcggtgactctcacacctgtaatcccagcactttgggaggccaagggtggcagatcacgtgaggtcaggagtttgagaccagcctggccaacatggcgaaacctgtgtctactaaaaatacaaaaattagctgggcatggtggcgtgcacctgtaatctcagctgctcgggaggctgaggcaggagaatcacttgaaccagggagcagaggctgcagtgagttgagatcacgccactgcactccagcctgggcgacagagcaagactccacaccccaccaaccaaaaaaaaagaaaaaagcagacaggccccgaggtgctggtgcagtgctgcccagggcttcaactggggtccatcctgaggcctgaggctggtgggcatgccctggcacatgcagggtgaatgtggggagggcactgtcatgttccaagggagtcaggacctggctctctatgggatttctagagtccacttctgatgcctctacaatctccaattagacccaagggagaaggaaagcaactggcactgtacaatctctcgccatcaaccccaaaatgagacctccagccagcttttctcacttcttgcaaacttctgacagtggtgtaattcctaatttgcaccagtttttgaactccgctgtgtgatttcttttttggagatagagtctcgctccgctgcctgggctgaagtgcagtggtacgatctcagctcactgcaacctccgcctcctgggttcaagcaattttcctgcctcagcctcccaagtagctgggactataggcacagactgccatgcccggctaattttctgtattttagtggagacggggtttcaccgtgttgccaggccagccacaaactcctgagctcaggcaatccgcccgcctcggctttccatgtgatttcaaatagttactgttcactgagtgcctacctagcaaggtgcaaggcattaacacatgttatgaacacagcaacctactcgcaggcatggggggtcacacagtcccaggcatgtccatcgtctcattcaatcctcccaacgtgacaaggtgagcagaacctcatctccattcacatctgagaaaacaagctccaagaggcaacaaccaggttctataatagcagggccaggatgtggagtctgactggcataacgagtccaagctccccttaccccgccccactcctttttttttctttgagacagagtctcgctctgtcgcccaggctggagtgcagtggcgcgatctcagcttactgcaagctccgcctcccaggttcatgccggtcttctgcctcagcctcccaagtagctaggactacagatgcccgccaccatgcctggctaatttgtttgtatttttagtagaggcagagtttcactgttagccaggatggtctcgatctcctgaccttgtgatctgcccgcctcggcctcccaaagtgctggaattataggtgggaaccaccgcgcccagcattttttttttttttttttgagacggagtctcgctctgttgcccaggctggagtgcagtggtgtaatctcggttcaacaccacctccgcctcccaggttcaagtgattctcctgcttcagcctcccgagtagttgagactacaggcctgcatcaccatgcctggctaatttttgtatttttagtagagacagggtttcactatgttggccaggctggtctcgcttttttttttttttttttttgaggtggagtctcactgtgttgcccaggctggagtgcagtggcacagtctcagctcactgcaacctccgcctcccgggttcaagtgattctcctgcctcagcctcctgagtagctgggactacaggcgcccaccaccacatctggctaatttttgtatttttgtagagacagggatacaccatgttggccaggatggtctcgaattcctgacttcaagtgatccacccacctcggcctcccaaagtgctgggattacaggcgtgagcctctgcacctggcccaccctgccctactcttaattgttctgagtcagtttcctcatctacaaagtcaaagtggtgaatgagaccagtgatttttaaactttttttagccacagaccttttgttcaaaggaaaccttaaatggagatgtaacacgccagctgcttaaagacacaggctctgcaagagtgagtgtgggagtgggagggggctacagtctcgccagctgggccccctcgctgcttctgcccagctctccctgctgcagcactggcactgcagggaaccttcccagccacggcgggctgagcctgggcctgtcaagccctgactggacatcctcaacagagaatgtttatggagtcagcacgaagccatgagaaggggcagcccaggggccagccaccctcacaggtcctccagggaggggccctcagagcttctcagcagggacagcaggttcagagctgagacaccgggcacgtggccagcacagatctgcagcacgcgcaccaggcgctgcgccatggtggccctaaagccttccacctgcggggagagcagagaacagcagtgagatagaatgctggccctgctcccttacccagagcagctgcaggggctgccagagcagggctgggggcggatacttgggggtagctcaggtcaccactgcccaccacagccacgccctcattcatgccacacctcagagtagcttccaactgcctcagcttgcccaatccttcaaacaacctccggagacatccagagcctgacctcctgctcaagaggaaatgaaggcttaacaaggctggctaggtcgaacaaactgtctagggtcacccagctagtgactccagagctgagctctgaatcagggctacttccaaccaatgcccaggcagctcgggccccagatgctcaagaccagggagcagaagatacagggataggaaggagggaggggcagcgggtggccctcaccacagataagaaggtgccatcaaaaaggaatgggcccaggggagctgtggggccagagagggacaagactgctctaggcccgggcacagatgttctagacacgtccgctggaagaacacgatgctgcccagtgtctgtctcaaaaaagaaagaaaaagaaagaaaaagaaagaaaaagaaagaaaaagaaagaaagaaagaaagaaaaagaaagaaagaaagaaagaaagaaagaaagaaagaaaaagaaagaaagaaagaaagaaagaaagagcctccagacctgtctctctatttctgccctagtttcccttcagtccactctcctcccggcagccagaggggtccatttaaaacccaagtcaggccacatccctccctggccccaagccctccagcagctccccaccaggctccactgatccagccccaccattcctgatttctccaccccaacccgccctttgctattgtgctgcagccacccaggcctgcctgccagaccttgagcacaccaggcaagtcccacactcggcccatgcacttgctgttcctccttccacgaggtatctccgtggcctgcctgcctacttccttcaggtctttatttatttagaagtcctgtttgcaggggcgttccctggttaccctgcctaactcttgcctgtttaccaccacctgacacgccacgcctccactttccagcacgtcatttaccccatttgtttccttgactagaacaaagctggggctttttttgttttgttttgagacagagtctcgctttgtcacccaggctggagtgcagtggcaccatcttggctcactgcaatctctgcctcccaggttcaagcgattcttgtgcttcagccccctgagtagctgggattacaggtgtgtgccaccatgcccagctaatttctgtatttttagtaaagactgggtttcaccatgttggccaggctggtctcaaactcctgacctcaggtgatccttccacctcggcctccctaggattacaggtgtgagctaccgtgcccagcaggaagctggggtttttgactcttttgttctgtgctgtgtccctggagcctagaacagtggtcggtaccacagaaactcaggaagtatttttttaataagtcctctaagtttggtggcctttgttcctgaaatctatctctaggctgctgaggcttgggttccacaacctgcctcctgcagcagcctcgacccagcctcctgcctctggccaggcttcctccaatccacatcactccagagacgtgacccaaatgcccaggtctgaccacaatcatgactttgctcatgacatccaagaagaaatgacctaattctaccaccaggctcccagagctcagcaaatccttctgctgttgcttatgttacatgtctgcttatttcatgagattctgagagggcagggccaatatctgactcatttgtgttcccagggcccagcacagagccctaccagcagacctaggcaattatttcactgggccaatcacataccttcctgtgtttcctcatcaatggaacggggccggtaattcctgccacgcaaaggcctcaagatatatggtggggcttaaactcaattatgcagaagagtgttctgaagaggacaacaccagcatgaagaaggaggccagttcaaaccctgggtgctccatctgagggatgcaggcctatgtcctgagcaggcatttctgcagctcctgctgcggcgggaaccaggctgggacctcctgcttcctgcccaggccaagagagaacccaggacctggcctggcctgccacctcatggccacagacagaattacaccacttgtcacagggtgagtaggcaccactgtcccccaccagcacctgaactatggagcaaagatcgtgactcccctttagagatgcttcgtggcagacaaagtgacctattcaaagtcacacggtcagcaggctaggacagcagaacagctggctctacccctcactcacgagctgtctgaccctgagcaagtcgcctgttctctctgggaggaaagcctggcggggcaggcacttcaggtgtgcccaggcctcagggtcccatctgtgagatcagagtgctgatctggtcaggggctcaaaaagtagtcatcaactaggaaatcaaatgcgtgatagagtcaagtgtgtatcatgatcgatgcatcgagcaaggggcaggcctaatggctgctgccacatgagacagtgatgagacctgcccaatcctaatgtgatatgaaaacatccccatttctactggcgacagccacagactgctatcctctgaattctgcccttagaccagaggagtgccctgacaccaggataagggaccctggtctagacagtggtgatggattggtggtcacagatcatgtgctgactcggttctccctgcatttcatcactttgctttcggtaacaggcacaagacccagaacagagcagaaacacaactcttcgaaatgtatctcaaaaccaataaacaggtttccaaaggaatggagcaggcctggcacatgggtgtggcagtgcgggccctgggacccctcagtagacccatcgcggggagcacatcaactcctgctgaggcctctttagcaaaaagtcatcaggatttatcctgcataaaaagcggctaaaggccaggctccgtggctcgctcctgtaatcccagcactttgggaggctaaagtgggaggatcgcttgaggccaggagttcaaaaccagtgtggggaacacagcaagacctcatcgctatattaaaaagtaaataaacagtggccgggtgcagtggctcatgcctgtaatcccagcactttgggaagccgaggcgggcggatcacgaggtcaggagattgagaccatcctggctaacacggtgaaaccccgtctctactaaaaaatacaaaaaattagctgggcgtggtggtgggtgccggtagtcccagctacttgggaggctgaggcaggagaatggcgtgaactcgggaggcagagcttgcagtgagccgagatcgcgccactgcattccagcctggacaacagagcaagactccatctcaaaaaaaaaaaaaaagtaaataaataaataaatacttagctaggtgcggtggtgcatgcttgtagtcctagttactcagtaggctgaggtgggaggttcacttgagcccaggagctcaagtctgcagtgagccatgagtacaccactgcaatccagcctgggcaacagagcaagaccttatctaaaacaataacgacaacaacaacaacaacaaaaaggctactttcctacccctcgtggttagtttcaccttgtgagaaacaccaacaggatccagttggggcagaattccctacatatgcatccaaccatctacccacctacccaacaaacatccctattgcctgctgggtaccctagcttggggtgggacgagacaagatctgaaatcagagagttaaggggaaatcaggcattctgactcccagaggacacaaggatgcaccagttaaagagacggacatacgcttggcctcacaatcacttacaccccagcaggagagtggactcacaaatacatacacataagacttagttataactgagtatgcagaaactcagcaaaagcaaaagcagggcagcacgtgctagagcctggcatataagatgcactccagatgaaagcacatcatcctcacttcacacctgtgtaccccaaggctcagggtgacctgcccaggtcatagccagtgagtagaaaagccactcaaaccaggatcctgtgtctccctccccttcaggagctgcctcgctcggatactaagtccttcgataagcattcccaatgtgcccactgtgtgctgaccaccctttccccgcacccgagtatagtgttggtctctgtgatcagcatgctcacctccaggtcacagtagagcagggggctttgataggtgtgggccagcttcaccacggtgtgccggtgaatgctgcagtggctctcccgcccagctggaaagaagccatgagtgctatagctgcaatctctaccttcctggctggaattcaggaagtgctgggcagagtcactcacttccccactctggggctcagtttctttctagtcgcgagggtgacagtcctattctactttcttttctaggtagtcaagaatatcaaattagacaatgaagataataatagctcctaccccactgagtcactctagagtcagtgagttgacatctagaaattacttggcctgcatttgctcaccaatgcttcttgagaattatctgtgccaggcactctgctcaaggagctaacagttcagctgggaaggcagacaggtcagacacctcatgcatgccggagtgacactggggctgagttttgaggtatttgtaggggttagcaagacaaagaagaggaaatgtatttgacagaagcctagagtaaacaaaaagaggacggccgggtgcggtggctcaggcctgtaatcccagcactatctgaggcaggcggatacctgaggtcaggagttcaagaccagcctggccaacatggtgaaaccccatctctactaaaatacaaaaattagctgggcatgatggcgggtgcctgtaatcccagctactcgggaggctgagatgggagaattgcttgaaccagggagacggtggttgcggtgagctgagatcacgccatagcactccagcctgggcggctgagcgagactccgtctcaaaaaaaaaaaaaaaaaaaagggacgggccctgtaacaggacttacctaggtgtaaaccttggctctaccacttttcatctaggggcctggggcaacttaacctcatgactgtaaaacagaggtaataacacctacctccaataggaatatgaaaacaaagcaattaccgtgtctgcctcacagtgacagctcaaaagatgtcagccattattattttcactgttaatattacaaagtctcaggaacagcaggactttttcagagaacgataagctgacccagagaaggagagtcaccggagatgagactagctcagaaggcagaggccaaactgcaaagtgttttatgtctttagagtttggattttaccgaaagccacaggcaaccactaggcaactccaagtaatggcagagttatctgctcatattcactcttagaaaggctgacaacaggtcagattccaaagtatgtgtatatgtgttctttcggtttttaaatttaacttttattttaagttcaggggtacatgtgcagatttgttatgtagttaaaacttgtgtcatggggtttgttgtacagatcattgtcacccaggtattaagcctagtacccattagttatttttccagatcttctccttcttcctgccctccaccctccgataggccccagtgtgtgtaaaatacatgctctttccatcacccagggtgcctcagcaagaagcctacggccgccccagctttcccttggctgggggtgggcagtaacaggcgaggaacgtacttaccacctgtggcgaggaaacacaccttccccaagaagaagctggcatccacatggcgcagggactcctctgtgttctggagactggggtggccaggccagggtgagaaaacaaaccagagaacaaaactttacaacggagaaagcagaagtccttgcttctctgatcctagaggccagagaatgacaagagggtgactttctctggagaaatatttgtcctttaattttttttttttttttttttttagatggagtttcactttgttgcccaggctggagtgcagtagcgcgatcttggctcactgcaacctctgcctcctgggttcaaatgattctcctgcctcagcctcccgagtagctgggactacaggtacatgccaccacgcctggctaatttttgtattttagtagagacggggtttcaccatgttgcccaggctggtctcgggcaatctgcccaccttggcctcccaaagtgctgggattacaggtgtgagccattgtgcccggccgttgtgtattttaaacattgtgcactgaccactggctcctctctcctcaccttacagattgacctcagccagcctctcccatcctcaccacttcccatcacaagttaggtcaccgtctcagcacagtcctgagccaggcctgcctgagccctgactgccccttcctctggctctcacctgtatttgctgtgaagattaaccacaaacacgatcaggtcaattcggggccgattcacactggagggcaaagggagggactttgccaagtggctgaaaaacaggaaattgcaggactcaagatatccgtacccccctcatagcgaccgtttaaatgctgcccttcatgtggaaagaggccgtcaagggctccccacctcatcctagccacccgaggctcttgtggccacgactccttgggccagcacagaggcaggacaggtccggtcctattcagattactcctgtctgattccctctgccagaaacgggctctgtttagtcaccacctcggcaaggggaggttgggatataagacggcatgggactagccagctacgctgcatgctgggagaaggaccagcctcagaggagggggcgctgggcttcggagtttagcagctaggaccgaatccctctggagtgagagacacgtgggcccaggccacagccgcggctacttacaccttcagctcggaggcgcagtcctctttgagcatcgagtccgccagctgctgcagaagagcatcctccgtgcccaccagctgcgcagggagagagagcggacagtcgagccctaggcacagcaccccctggggagggcctggcccttcgacccactcccggggggatcgggacaccgccagcaggcggctcggaggacatttcccgagaagtggaccccgcgaagcggcacgggctgggggcctgaggtttggacccgctgcaggcctgtgggcaccgcactctctactacccgaccctcgctcccaccgccggcctctccaggaggccagacccccagacgcgggaaaaccaattccaggcgcgggaactcgccaatcagaagctgggaaagggtccgccgagcacctattggtgggtgcgtccctcaacctcagagagcggctactccaattggttcagagcatggctctccgcctattccccgcccccgccacggtagcgcgcgctggcttggcgcctcagagagctcagttgacctagtggctgaagcaccgcccaggaggaaaaaccggcgggggaagcagggccgcctgcacctaccaagatggtggccgtgttcaggccgggcagcttgtccaggggcctcaacaccgacatcacagccgcaggaccaaccgttgctcctgcggtgcgcgccgatctttcaaaccgccctgagtccagcccctagagcgcggcctgggggcacgtgcctccttataggcggggcttcgcgggacgggacggggcctcttaaaggaaccgaacctttatctccttttctgaggggcgttccagcgctacccgtggaacacgtggtggacaggcctttggttccacgctccacagtaagcaggtttttagtgattcctttgttcactttcattcattcatgctcatacacagtactttttttttttttttttgagacagagtctcgctttgtggcccaggctggagtgcaatgcgcgcaatctcggctcactgcaacttctgcctcccgagtttaagcgattctcctgcctcagcctcccaaggagctgggactacgggcgcgcgtcaccacgcccgacttatttttttatttttagtagagacggggtttctccaagttgcccaggccggtctcaaactcctggcctcaagtgatcccgcctcggcctcccaaagtgagtgctgagattacagacgtgagccaccgtgcctggccctttttttttttttttttttggagcgtcactttgttgcccaggctggactatagtgacacgatcatagctcactacagcttcaaactcctgggctcaagtcatcttcctggcttagcctcctgagtagctggaactacaggcaagtgccaccatggggatctggccatgttgcccaggtgggtcgtaaactcctggcctcaagcagccctcctgcttcagcctcctgagtagctgggactaccgctgcacaccagcaggccctgccaattgactgcttttacagtgagtggtaagcatgctgttctttgtccaatgggagactttacctcatctttcaaggttccttgctgcaaacacagcctgagtacagagctgtcagggtcttgctttcttgacatacccagcaagaacatgcagggacgctcagggcccatagcaaactggttctgccaacagttatataataacttgttcactgtctctacatctaaaatgtaagaaacaagaggttagagactttgtcactttgtatgtccagcactctaaaagtccctggtacatcgtagttaataaatatttgttgagtgaatggatggattacattcatccattcattctcagcagtcattcattcatcatttcctatgcccagacccaatgccctaccctaggaagtcagttgaatcagacattattgattaacttagtttgatgggggtgggatagacaatgataacagtgtgttcattgttgtaataactgggagagcagagacactgtctagcctaaatccttcttactgcagactaaactaactgtgtcttgctcagaaagatcaggacgtaaatggccccatagagccactgccctcagcacagatacggctttcattcctcatggcatggggtgtggagaggacttcctgaaagtcaagcagtagtaggcactatgacaagaaaataaagtaagctgaacgccgtggctcatgcctataacccagcactttgggagaccgaggcgggtgaatcacttgaggccgggagtttgaggccagcctaggcaatatagtgagacctcatctctacaaaaaaatttttaaattagctgagcagggtgggcatggtggttcacgcatgtaatcccagcattttgggaggccgaggcgggcggatcacctgacatcaggagtttgagaccagcctgaccagcatggagaaaccctgtctgtactactaaaaatacaaaattagctgggcgtggtggtgcatgcctgtaatcccagctacttgggaggctgtggtaggagaatcgcttgaacttgggaggcagaggttgcagtgagctgagattatgccagtgtactctggcctgggcaacaagagcgaaactccatcacaaaaacaaaaaacaaacaaacaaattagccaggtatggtggcggtggcgggcgcctgtaataccacctactcgggaggctgaggcaggagaatcacttgaacctgggaggcggaggttgcagtgagctgagatcgcaccactgcactccagcctgggtgacatgtgagactccatctcaaaaaaaaaaaaatgaaagataaactaaagctgtctggcagaagagatggatgggaggaggctactttagagcagggaggcctccctaaggtgacatttgagcagatgcttgaattcagtgagagaggggccccttaagtatgatgaagaagaggcctcaggcagaaggcagtgcaagtggaaagcccctgagtgggaagcactcctggcacttccgaggcgtagcaaggaggccagtggctgtggcagatggagtaagaagaacaggggaggaggtgaggccacggaggtgattgagctcccagagactgaggcccttagagagtggtgggctgggaaaagactttggactctggtggggactttccaggaggggccgggctgagacccattgggtcagcatgtgctgagtgcctgccctggggaccctggtcccagaggggccaaactgcttcagggagttaccacttgtaacaagagacaaggcactgcagttggggaggccatcggggagcagccaggagcagcaggaacccaggggaagctgctctgtgtccctggggagcctgcactccacttcaccggggcggtgatcattggctgaacagaaagtagttgtgtttaagatccatacatgatgaagggtagggatggggaggaggccagatagaggcctggaggttcttacatcctgaacacccaagctggcagggtcatcagagtcctctgggccagcatttttcaaatcggcttctgtggagccctggggagatgacttggggtcctgtgagagacgggggattccgagtgggtggggtccagaacccccacccccacccaaccattgaaccgaagcaacctccactttatctctgttatgtattgagcttcccataagcttttgtatgaataaggaatcagtggctaaaacaatgccgacaggccatggatcacatactttacagatttattgaggcataagggacacgtataatcaactacacttatttcaagggtacaatttgataagtttgacatatgtatatacttaagaagccaccatcaccattaagagcctgaacataccttcaccccaaaaagtttactcctgcccctttgtgattcttcccccaactcctctgctctcccaccccaaaatgttaaaaagcactttggccaggtggtggctcacgcctgtaatcccagtactttgggaggctgaggcaggaggatagcttgaggccagaagttcaagaccggcttgggcaatatggcaaaatcttgtctctacaaaaagtacaaaaatcagctgggcatagtggcatgcatttgtggtccaagctactcgggaggctgaggtgggaggatcacctgagcccaggaggcagaggttgcagtgagccatgatcacaccactgtgctccagcctgagtgaaagagcaagaccttgtcttaaaaaacaaagcaaaaggccaggcgcagtggctcacgcctgtaatcccagcactttgggaggccgaggtgggcagatcatgaggtcagtagatcgagaccatcctggccaatatcgtaaacccgcctctactaaaatacaaaaaattagccgggcatggtggtgcccacctgtagtcccagctcctcggaaggctgaggcaggggaatcgcttgaacccgggaggtagaggttgcagtgagccgagattgcgccactgcactccagcctggcgaacacagcgagactccgtctcaaaaaaaacaaaccctctgtgaactcacagtcaccccccagtcccacatatgctggaaaggacctgtcatacctgaagagcccctagatggcgcagaggtgtctgtggtgggggacctaggtcctgaagccacctcacccagaggctttccccctgcccatccccaggtttctgggaacggattccctagggaggtggttcctggaagccttttcccagccacgccccgtgggccctagggggctgctctctccctcctgagaatagccctcaacacgtggcagataccttgtctatggcatagggggagggggaggatccatgcttgggaaggtggaccccacccccaacgtcagctcttggctttgaattccagctcagtcactgagaagctgagggctctgggagaaggagaaggccagcagcatcacctctctgcctcatcccaaaatggggtctcaacaccaatccagctgggaggactgcaggaagtgatgttggggccagctggaagatgggagtgctcaatgcctgtgctggctgtacaccagccaggggtgctgtggggtagatgaggcagaatggggagggggagccatttgcaagggtcctgaaagccaggctagggctctgaccctggcattgctactttcttgctgtgtgaccatgaataagaattaattgagttaatataatcaaagcgttgaaaacagtgtctggtgcataggaaatgttacattgagccaatgtgtctgaactctcagactcagtcttggtttttccttgtataacatatgacccccttgagctctactggtcactgattctctgtccccacccgcttgccatttaccccagcatctccctgctccccaaatggcagaccatcaaaccttagagttatcagccacggtcctctcctctctaggcccaccaggcttggggtcctgcagcctgctgggtgattccccctccccgcactcccccaatcctgccgctctgtcatctgctgtaccacgtgcacagtaccagggatccagaagagaaggctggttgccagggcaacggaagataaagcccttgctctgccaggctgctgattggctgagacaggtcccacctcctgccatcctgagagtgggggctagggggaagggtctctgatgggcagggagagataccagggtgctgagccagtccaggactgccccctcctggcccactcagagcccctgggtgtgagaagctcgtctcccgtgggttgcattggctctgccctatctctgcctccagcacccagggcggccgcagatggcagtgtctctggggacagcagctgcgaatgagtccacgggccaatgctgagctgctcaggctgaggcggtgtgctcagcacagagcccccggaactggcatctgcagggcgtgaggtgggtctttgggcacacggagggcaccgagtggtgccaatggcttgggaggtagggagaggggctctgcaaactcacactgtctcaggcagcacattggctgaaatgaggctggaaaattccatatagatcatctggtaaccccatccccaccctgtcaccgtgcacaggggaccgtgaggcccagagagggtgaagaaggggccaagataacacaggaggccagtgagtgtgttgcttttccacctaggtcagttccctgagaaatcaggaagagaccacggggtcctcagtcagcctcagaatgcctgggattttgtgcacagggctggagaggttgggggaccttgatctctattccacatcccccagcattgcagctgaaatggcttctgttctgccccagccctccattcgcatgtttaagctggaaggaaactgggggcctggctgggcctggatagggggcatgagtcaccttggacacagttaagtcacacagggagcagcctccctgcctgaggtgctccttccctaccttcaccaaccctggcagcaccagacaatcctgcactctctccagctccccagaaaggcagctggttaaaaggtgctgggtcctacacgctcccctgccctggctgcactagtcactttggataatcagtgcactcttcattttattccttcacaaatagggcactttaatacaatgtcggtgcctcagaacagccagtgaggacctttggggtaggagaggggctccggatggatgcaggaccaggaaacagcatctttccctcccctggggccacagcttccctcacaggcccacctgggagtagagagacaagaggagctggagtttggagacggaggtcagaagagtgagggcttctctccgacctacctggagttctttccatccatccccctgctttcctccccagaagcaaggtgggcatctgctcatttcatcctgctcaggtgcctttccctcccctggaggacgcaagcctcagggcatcgctggggtttggcgtctagctctgccactttccagttgggtaagccaaggcaagttagtgagcctgtctgggcctcagtttcttcatctgtaaaatgtggatagtgacacttgccccataggcctgttgtgaagtttgtggaggaagtcaaaacagtgctctacctgccgggcaggcagaggtgggctcctcacgtcacccctttcttataactagggaaggttgggggtgggttcaataggccctgcatcatcctgtccctggaggagatgatctgtgatctgtgatctgttttttttttttttttttttttttttttgagatggagtctcgctctgttgcccaggctggagtgcagtggcgccgtctcggctcactgcaagctctgcctccggggttcacgccattctcctgcctcagcctcccaagtagctgggactacaggcacctgccaccacgcctggctaattttttgtatttttaatagagacggggtttcaccgtgttagccaggatggtcttgatctcctgatcaagtctcaaaaaaaaaaaaaaatagagaatggtaacaagtacccaggtgatagagcttttgtgtctgctgaatgagttaatttatgtaaaatattcagaaccagtgcctggcacataacaagtgctacatagtaagtttgttcttattctctgagcctcagtttccttatctgtaaaatggggataggaatagcacccacgtcctaagggtactttgaattttttttttttttttttttttgagatggagtcttgctctgtcacccaggctggagtgcagtggcaccatctcggctcactgcaaactccgcctcccaggctcaagcgattttcctgcctcagcctgttgagtagctgggattacaggtgcctgccaccacccctggctaatttttgtacttttagaagagacggggtttctccatgttggccaggctggtcttgaactcctggcctcaagtgatccactgccttggcctcccaaaatgctggaattacaggcgtgacccaccacagccagacagtgatctggcttttgaagtatgagtaggaatttgccaagtgaacaagaatgcatatgcaaaatgaaagcatatgcaaagatgaggactgcataatgtgcaggcgcatgtaggtgacggacaggcagttccatgtgaccgcacatagtgtgccatgtgaggagggggaggttggcagggagcagatgggcacctttgggccattctaaagagtctgggtgggccgagcacggtggctcatgcctgtaatcccagcactttgggagtccgaggttaggatcacttgaggtcaggagtttgagaccagcctggccaacatggcaaaaccccgtctctactaaaaaatacaaaaactacctgggcatggtggcagatgcctgtaatcccagctactcacaagggaggctgaggcaggagaatcgcttgaaggtggagcttgcggtgagccgagatcatgccattgcactccagcctgggcaacagaatgagactctgtctcaaaaacaaaaacaataaaaaagagtctgggtgtatataaggtttgtgacgcaccttacacctgctaccttccactttcctgccttctccgcctctcgctcagtggaaataacaatagctgatattgaccaagtgctgattctgtgccaggcagaatggtgcaaaatgcttttttattttaatttttttttttttgagacagagtttcactcttgttgcccaggctggagtgcagtggcacagtcgtggctcactggaactccacctcctgggttcaagcaactctcctgcctcagcctgccgagtagttgggattacaagcatgtgccaccacacctggctaattttgtacttttagtagagacagggtttcaccatgttggtcaggctggtcttgaattcctgacctcaggtgacccatcctccttggcctcccaaagtgctgggatcataggcatgagccattggcctggttgcaaaatgctctttaggcattgtcttgttaaaactgcaaagtacccaggctgcatgcggtggctcacgcctgtaatcccagcactttgggaggccgaggtgggcggatcacgaggtcaggagatcaagaccatcctggctaacacggtgaaaccccgtctctactaaaaatacaaaaaattagctgggtgcagtggcggtcacctgcagtcccagctactcaggaggctgaggcaggagaatggtgtgaacctgggaggcggagcttgcagtgagccgagatggcgccactgcattccagcctgggtgacagagcaagactccgtctcaaaaaaaaaaaaaaaaaaaattcaaagtacccttaggacgtgggtgctatttctatccccattttacagataaggaaactgaggctcagagaataagaacaaacttactatgtagcacttgttatgtgccaggcactggttctgaatattttacataaattaactcattcagcagacacaaaagctctatcacctgggtacttgttaccattcccttttttttttttttgagactggatcttgctccaggctggagtgcagtggcgggatcacagctcactgcagcctccatctcccagacttaggtgatccttccacctcagcctcccgggtaactgggattacaggtatgtgccaccatgcccagctaattttttgagtttttagtagagacggggttttgccatgttgcccaggctggtctcgaagtcctgggctcaagcaatccacccgctttggcctcccaaaatgcttggattacaggcatgagccaccacgtccagccccattcccattttatagatgtagaaaccaaaggtctgaatatcttgcccaagtgttttggtgctaggggccttgtccttacaactatgaaactgggcttgtgtagactccattgatatcaaccaggtctccttcaatgggtgtttgttcactacactttcaccaggccacacttggctagggcgtgcaggtggctgggagacctactcatctcaggggcaggtgctggcaactggcagccatggcagctgcagtcagggctgggccccggggctcaggggcacaaggagaccagaggaggcatcgcccaacctgtcctttaccgagtgccctgcacaggccccatccagggatcagtcaccccactgaatcctcactaggaccagtgtagaggtgttgcccctttccccttccataggggaggaagctgaggccctgcgaggttaggcaacttgcccaagggcacacatcctggcaagagactgaaccagaactgctcatggttaagtcgctctgttgcccaggctggagcacagtggcgcgatcttggctcactgcaacctccacctcccaggttcaaacgattctcctgtctcaagtagctaggattacaggtgcgtgccatcatgcccggctaatttttgtatttttagtagagatggggtttcaccatattggccaggctggtcttgaactcctgacctcaggtgatctgcccacctcggcctcccaaagtgctgggattacaggtgtgagccactgtgcccagcctaagactccttaaagggtgaataggagctgggtgtccccatggcgtggggatagctctgtgcttgcccacgaggcctgggcggctgagtcaccacgtggtctttttttttttttttttttttttttttcctgagacggagtatcgctctgtcacccaggctggagtgcagtggcacgatcttggcccactgcaagctctgcttcccaggttcacgacattctcctgcgtcagcctccggagtagctgggactacaggcatgcgccaccacgcccggctaatttttttttttttttgtatttttaatggagacggggtttcaccatgttagccaggatggtcttgatctcctgacctcgtgatccgcccacttcggcctccaaagtgctgggattacaggcgtgagccaccgcgcccggcctaccacgtggtcttgatcagccgcttccccgcccttgctctcctggacctcagtctccccatttgtaaagtgatgcttgggcctcgggctctgtgaagcctgaaggtctccctctgggtgggcgggacagggagcacctctgctggccctcaccacgctgtgtctccgcagccaaggccgccgcgatgccgcacttcctggactggttcgtgccggtctacttggtcatctcggtcctcattctggtgggcttcggcgcctgcatctactacttcgagccgggcctgcaggaggcgcacaagtggcgcatgcagcgccccctggtggaccgcgacctccgcaagacgctaatggtgcgcgacaacctggccttcggcggcccggaggtctgagccgacttgcaaaggggataggcgggcggcaccgggcgccctcccccagcccgccccgcccgcccagcccggagacccccaaggcagagggaggccggcctgttggccctccacgctatccctctgcagcctgggccctcccgacagaggccccaggtgcgctggcagtggaggtggggcacttaggtgcctggctggcccagggcttgctctccgtgtcaagccgactcacccagagcccaccctcccaagctcaggggcatcctccgctgggccccagtgcctttgcgctgcgcagcactctgccctccactggactcaggcatgtctatggctgcctgtcctgaggctccggagccctcatttcttcgtgaagtccccagctcccctgcctccactcaatggcaccggccctgcaactttaggcaggtcgaagccaacccaaggaaagaacctaagaacctcgtttggagggatgtcagcttgggccagaccagccgcaccccgcggggctcaggcttggaactggtgagggtgtgtggtgggggtatgcagagggataagaccgtggtagaggagagggttggtgaggagagagagagagagagagagagagtctggggggagcgggcaagcatggggagatgagatgtgtatatgtgagagagagtgtgggggccccaggcagggcaggaggtggtggaaacggggtgaactccgtgggctgtgtgaggactgtccatagtgggtcccaaccccctccctctgctggagtttcctagcccttccccctccccaagactgtggcagcaggcaggagcccctgccctccctccctgtcctgtgccacacttctggggccaaacccagcccccttgagccaggccctgccagactccaagcccaccctagaaccctcctcctgtgtggagactctgttgccccactttggacacagattggcaacctgcctcaccccgccccccttcgctggggcttccatcttaatttattctcaataataaagacttcatgatgatctctgcaggaccctgtcttttcctgaaatgaggatcatgtctgtcaactcactgggtcctcatgaaaaatatgacagctccatagtccccattttagggatgggaacactaaatctcagggaaggtaggccagggcttcccaagagctgcagtactgacattttggactcgatcactcttggttgtagggggttgtcctgcccattgtaggatgtttagcaaccctggtttctccccagtagatgccagttgcaattgccccctctcctgttaggacaatcaaaaatgttaactgggctgggctcagtggctcatgcctgtaatcccagcactttgggaggctgaggtgggcggatcacctgaggtcaggagtttgagaccagcctggccaacatggtgaaacctcgtctctactaaaaatacaaaaattagccaggtgtggtggcacatgcctgtaatcccagctactgcggaggccaaagtgggagaattgcttgaatctgggaggtggaggtggcagtgagccaagatcctgccattgtactccagcctgggcaaaaagagtgaaactctgtctcaaacaaaacaaaacaaaacaaaacaccccaaaaatgttaactggaactcctggggtagattaccagttaggatacaaattcagacacaaccaagatgcaaaacaacagagccttacactgtcaacaaaaagagtccaactcttttcggctggagcacagtggcacgatctcagcccactgcaacctctgcctcccaggttcaagcgattctcctgcctcagcttcctgagtagctgggattacaggcggccgtcaccacgcccagctaatttttgtatttttagtagagacagggtttcaatatattggccaggctggtctcgaactcctgacctcaagtgatccacccacttcagcctcccaaagtgctgggattatagataagagccactgcgcccagccaaactgccttagtttctcagagagttaggggtgtgaggctgggattagaagctcagtgcagcccctgttcatccagaaaactctttcccagccatggtcagaggcaggactgaaaagggcccaggccaatccagttaggagtgatcattgcaagggacagaaacttgactgtcctagcttggccaagacggccagataccatgaggacactgcggtattctgtccctttaggacaggaaagtagtgggcttaggacaactagagccaggcatgcagacccccttaggattctttttcttgttagtcgccactctcacaccctcagcatggaaaacacagcagtcagctgctggcaatttctgtatctcacagctccagcccctggagctaccagtccttgctctgcccccagtgcaaatatctctggggtgggattcgttgcctcattttaggtcaagtgtccatgttaagccagtcacccaaggctggggcagtgtcctgtgggtggttcagcgtgggtcatctcagaacaaggcagatcccttgggatgtagggagaggaaaaggcaggtttcaggaaaaatgatgtaaactcccccatccccacctcgaccacaacagactcttttggaggtagattaggcttgactggctgagcgagggagggcctccaggcatgatctggcctgcagccaagtttgatttgtcccacatagtgttttgaaaaaatgcaaattagttgccaacattcaccagtcaggagatttcacactagaatctttttctgactcctccttaaaaataaaaattctagccacatagagtctgaagtgtaaatgtgttcatggtcacgagcttcacagcctgggcagggagggtgctgactgtgaccctgccggaggccttaaggtggccagtcctcctctcaggagggctgcctccattcaacggctgtagcaagatttctcatcctaggctgccatcaaaggaaggctgagagattcatccaagccctctgctcttcaacctggatcctttcccagacttctcccctgggctcattgcataaatgtttatttacacctgttcttcccctaaaagattcaagaaggtttcagttgaaggagccacataacatgggtgtaaggaggaaatattttaattctgactgctactgtaatgctgttattattacttgtctctaagcctcctggcagccagagggaaaggagaaacacaaagagggctttattttatttatttatttatttatttatttatttatttatttttgagacagagtttttgctcttgttgcccaggctggaatgcaatggtgctcactgcaacctccgcctcccgggttcaagcaattctcctgcctcagcctcccaagtagctgggattacaggcatgcaccaccacgcccagctaattttgtatttttagtagagacagggtttctctatgttggtcgggctggtctcgaacgcctgacctcaggcaatccaccagcctcaggctcccaaagtgctgggattacaggcgtgagccactgcgcccggcttttttttttttttcttttttagaaatggggtcttgctatgttgcccaggctggtcttgaactcctgggctcaagcaatcctcccacctcccaaagtgttgggattacaggcgtgagccaccacacctggcccatctttttattgttatgtgatagaagggagagattcactcttcatgaaagacaattttttttctgttttttgtttttttttttttttttgagacagagtttcgctcttgttgcccaggcttggctcactgcaacctccgcctcccaggttcaagtgattctcctgccagtagctgggattacaggcatgcgccaccatgctcagctaattttgtatttttagtagagatggtgtttcgccatgttagtcaggctggtcttgaattcgtgacctcaagtggtccgcccgccttggcttcccaaactgctgggattccaggagtgagccatggcacctgacctttttctggttctaaatatgaaaaagaaatgcctcagatggtatagtaaaagcaacacagtggaggggagggaaggtttgacccagatggcagagcctacagaaacaggccattgcccgtggaggcaggatgttttttccatctgcgaggggatgccagaggactggactaggagcgattcgaggtcaagacctgataatagttaatcctataaaaccattgatttaaattgcacatccttgggcaagtttcctgagctctcagaaacacaaccaaacatttttgtgtcaggcactgagaatcacagatgattaaagctcaaaaaaatgtcccctgccagtgtctggcattgtgctcagctcctgtcaggttctccgtatagccctgttcatttcttttttttttttttcttttttcttttccttttttttttttttttttttttgagacagagtctcgctctgtcgccaggctggagtgcagtggtgcgatcttggctcactgcaacctccgcctcccaggttggagcaattttcctgcctcagcctcccgagtagctgggactacgcaccaccacacccagctaatttttgcatttttagtagagagagggtttcaccatgttggccaggatggtctcgatctcttgacctcgtgatctgcccacctcggcttcctaaagtgctgggattacaggcatgagccactgtgcccatccaagccctgttcattttcatatcactcctgccctacctccctcaccgggtgatggcaaatgtcagagatagtggggaagaaagcactgtataaacgccatgtatcacatagctatcctcttttttttttttttttgagatggagtcttgctctgtcaccaggctggagtgcagtggcacagtcttggctcactgcaacctctgcctcctgggttcaagcgattctcctgcctcagcctcccaaatagctgggattatgggcatgcgccaccatgcccagctaattttgtatttttagtggagatgggggtttcaccatgttggccaggctggtcttgaacccttgacctcgtgatctgcccgcctcggcctcccaacgtgctgggattacaggcatgagccactgcgcccggcccacagctatcctcttgaactctacagaggcatgtcacatacctaggcctggcaccaagaatgtaatggaaaagaggatgtccctgcatcagaagagctcacaaactggggttacagaagtataaacagacaaactattattattagtagtagtattttttgagagggagtgttactctgttgcccaggctggagtgcagtggtgtgatctcagcttactgcaacctccgcctcccaggttcaagcgatcctcctgcctcagcctcccgtgtctgggactacaggtgcgcgtcaccatgccagggtaatttttgtatttttagtagagactgggttttgtcatgttggtcaggctggtctcgaactcctgacctcaagtgatccgcccaccttggcctcccaaagtagtgggattacattgtgcctggccaacagacaaattataaaactgtacctgcagcaagagaagtatgtgtgcagaactggaaacggaaccgaagaagtgcctagtttttggggaagggggttgtcaaggaaggcttcccggaggacatgactattaatctgggttctggaggtggaataagagttttccctgcaaagggaaagaaggctgcaagtgttaagccatggactctggagagaacctagtcctttttgaggactgtgagtggtgtggccaaaagacagaatgcaagtgagccagtggcaggagggcaggcggattaagcaaccagaaagtggcttttcaaggaaggcttagacccagactgagaacccgatgaccttcctattaccacctactcgaggaagccttccctggcccccccagcagctttccccattacaatgctaatcttgtgttgcgattttgttcacgtcagtggggagcagtgaccacatcttctcatcttggcttgcagccttactggcactggtcagggcctccttaaaagcttgcttgttgcaagaatggggctagtttctttggaagtcctgccaggagttgcctgtttgcttagaaaccaagatttcagaaaggcttggaggtttcctgggcatcaagctgtgtgcagatttttaaaatgctttgagaggttttgcagagtcctgggagctttcccaacatctgagagctgtcaggatggggaagggcaggtgtgtcagggttcggcccagaacaggaggacaggaggcgggaatgtacagggtccctgagtaagaatggctgcaatgttcggattccagccctggagggtggcacaggctcctcattgttccgccccctcagttcttcacactggctgagaaggaagggctcgggaaggctgagagaccagctttgggagaagggcaaagactgcaggctccctcaaaagactatcacagtctcagtcaaccacccttacagagaacccctggcaggcagagcttttttctccctccctcataaggtatgacgggctcagtatttggagcctggagacctaggtgtccagctactgattcactgtgtgaaccttggcaggtccatttccctctatttctgcagctgtaaacagctggaactgatgagaaagtcagaggaaatcatggaagatacataaaaaaggaaatcagagtgccaaggcaacaatttgaatggctaacatggactgagctcatggactagcaattgcccattgcatttgtttgtttgtttgttttgaggcagagttttgctctttcgcctggactggagtgaagtggtgtgatctcggctcattgcaacctctgctccttgggttcaagtgattctcctgcctcagcctcccaagtagctgcgatcataggcgcccgccaccaggcccagctaatttttgtatttttagttgagatggggttttgccatgttggctaggctggtcttgaactcctgacctcaggtgatctgcctgcctcagcctcccaaagtcctgggattacaggtgtgagccaccgcgcctggcccccattgctttttttttttttttttttttgtgagacagagtttcgctcttgttgcccagctggagtgcaatggtgtgatctcggctcactgcaacctttgcctcccgggtttgaacgattctcctgcctcagcctcccaaagtagctgggattacaggcacgcgccaccacacccagctaagttttttgtatttttagtagagacagggtttcaccatgttggccaggcttgtcttgaactcctgacctcgtgatccgtccgcctaggcctcccaaagtgctgggattataggcttgagccaccgcgcccggccccccattgcattcttatggcaaccatgcaagtgggtcctcactgctgttcaccaaaggtttctgactctccagctatcagcacacggtaggattaaacttccctgcctccttgtgatgggtggggccataagactagttctggccaattagttgtaattagaagtgagtacaggccgaatggctgatggactaatggctagtccacaatttgtcactccctccttccctctgccacatgactagcaatgcactagaaggcagcctgggtcccagagggaagagggcacagagcagagccttagtggacccaaattactgtggacatgagacatggatgagaaatcaatgtatcattgcggccaggtgtggtggctcaggcctataatcccagtactttgggaggctgaagtaggaggatcgcttgaggccaggggttttagaccagcctgggcaacatggcaaaaccctgtctctacaaaaattagaaaaattaggctggacgcagctcacgcctgtaatcccagcactttgggaggctgagaagggtggatcacttgaggtcagaagtttgagaccagcctaatcaacatggtgaaaccctgcctctactaaaaatacaaaattagttgggtgtggtggcacacacctgtaatcccagctacttaggacgctaaggcaggagaattgcttgaaactgggaggcagagtttgcagtgagctgagatcatgccattgcactccatcctgggcaataagagcaaaactccatctcaagaaaaaaaaaaagaagaaatattagctgggcgtggtggcacatgcctgtagtcccagctactcaggaggctgaggtgggaggatcacctgagcctgggtaggtcgaggctacagtgagctgtgatagtgccactgcgctccagcttgggcaacagagtgagaccctgtctcaaaaaaaaaaaaaaaaaaaaaaatcagcatgttgttatcagccactgggatttgggaatggttgttactgcagcataatttaactcattctgactgatataatctccattttacagatgagaggggagctcagggggattgacttgtttgaaaatcacatagttgtaacaaacccaggcttgaaggactccagagcctatgacacttgtctgggaggccaccacaatggttttgtggttgagtggaggcctctgttctctgaggccacttccaggcctatggatctttcctttgatgggaaagcaccatatgtatagataggagagggccattgtcactttgggcccctagagggcagctgaaacttggcctgtaattactgggcaggaagtgtcctctaagcctctaagcagggcagatgggcaggaggatgcggagatgaacatgactcaggccttgctctcaaggccctaacagcctggcagggagcgagatggaggaattgtagatcttgaagtagaagagaccgaccacatgagggcatctgatccctattttaaaaggcaactgagtcccagaagcacaagttaatctgatagacgttgcctggtgaatcgttggccaaagtggggagagaacccagggccactgatttcagcccaaggctgcttatctcacagagatcatgtaatccaatggggctgggcccaggaaagtctcccttgctccaatccgtccaggcagagctgtgcctctccttcccagcaccctctgttcttccttaagtcaggccagttctcagggcctcaaagcatggaagcgccagatagctgccctcccccatccactgggatcccagcacgttgccctggtaaccagagcccagccaagtttgagaacctaaagctgtaaggggagagaaaggataagaagagggataggggctgggcacggtggctcatgcctgtaatcccagcactttgggaggccgaggcaggcggatcacaaggacaggagatcaagaccatcctggctaacactgcgaaaccccatctctactaaaaatacaaaaaatttaggtgggcgtggtggcgggtgcttgtagtcccagctactcgggaggctgaggcaggagaatggtgtgatggtgtgaacccgagaggcggagcttgcagtgagtcgagatggcgtcactgcactccagcctgggtgacagagcgagactctgtctcaaaaaaaaaaaaaaaaaaagaagagggatgggtgctaggcccacacaatcaccattcaatcattcattcattcattatttctttctaaagaaatttaccggttgggcacggtggctcatgcatgtaatctcagcactttgggaggctgaggcagatgcattacttgaggtcagaagtttgagaccagcctggccaacatggtgaaaccccgtctctactaaaaatacaaaaattagccaggcgtggtggcacacacctgtaatcccagctacttgggaggctgaggcaggagaatcctgaggcttgaacccgggaggcggagttgcagtgagctgagatcccgccactgcagtccagcctgggtgacagagtgagactctcaagaaaaagaaacttactgaagccaatttttgccagaccctggggcccagagaagaagatccaggaccttcataactgagctttccacccaggcatggtggctcacgaccgtaatcccagcactttgggaggtggaggtaggagtattgcttgagctcagaagttcgagaccagcctgagctacatagggagacccccgtctctacaaaaaataaaaacttagctgggcgtggtggtgcatgcctgtggtcccagctactctggaggcagaagtgggaggatcacttgtgcccaagaggctgcagtgagccatgatggcgccactgtcttccagcctgggcgacagagtgaaaccctgttcaaaaaaactaataacaacaacagcaacaacaaacgaaacagagctgagctaatatggtagccacagattaaaataaactaaaaaatccagttccttggtcactgtagacacattttaagtgatcggtagccatctgtggctagtggctactgtactggacagcacagacatagaacatttccattatcactgaaagttgtattgcccagcgcagctccagaagctcactcgctaaagagagagacacacaggagagcagaccagacaacacagtgttgtgtgggctgcaatgtcctcctcggtaaaaagcaggtgatgaggcggagattaaaggagatgccaggagaatgcttagcctagttcctgactcagggtgagtgctcggaggacatctgccatcaccgtacaggacagtactataggatctgtttacatacctatcttcctagcagactgtgagctccgcccagccctggcatggtgccgggcacagagcaagtgctcaggaaatagtagctgttatcagcaccattgttattatcaccactgctatgacagaggcagccgagggctgtgggaacacagaagagggctcccatcccagccccagggccaggggctgctgagagtcggcattgccagagccaggctgggtggctttgtggtcccctcaggggcaggcctagggcggggtcctcttcacacccttagggtctgggtacagggtccagctggagcaagctggggctcagggaatagttgtggaaggagctctagcctccaggaactccagcccccttgaggaaagaccaggtgagtgggcaagatggtctgagggttgcagagctgaacagggcatgaagggcacagaggcagagccagagggagactcgcgctgggactaccagagtgcagccatatttggagtacccctgtttttactgcagactccccaggcatcaaagtctgtgggagacagagcagatttggggagggcaggctgcagggaacctccctgcaggtggccgtgagtgccagcctggccgttaccagcctcccatggctcttcaggattccagaggctcagagcagccattcacagccgcccactcctaggaagccagcccctccctgcaccagagcccagcccagcacggtctccggggatgtagctggtgggacagtgagcagagggctgggccctgtgcctggggactgtggcctggaggctgagcaggagctgaggaggggaccagagggacaaggcccctaagctggccaccatggccagactctgagtgcaggggaggtgaggggcctgcgtgtgccttatcttcccagacacactggatccttcttgtcctctgatcaaggtaggtgtgtaggggggtggaagggtgtgggggtttgtgggggtgggagggtggtgggggtggggtggggaaggaccaagcaatccatggaagatgggagtgcagtgaggggatggggagtcgggtgatgccctcggacaccctgtcctctggcctgctctgtgtgtgggtgtgcacactgaggggagctgtttgtggctaagtgcagggtaaacgtgtgtgcccaagtggatgtggctgtgcaggagggggcagaagttcagggctgcagtgataggccaggtgggaaagggttggaggccaggacagtcttggatacaaatatatggctggagagggatgaggggctgggggcaccattgtgaggggtgatgccttccctgtccggtgccctgccttccccgtccctgctgcagacctcaaggacctggctacatgatcactcccctccccatgagccctctggaactgactcctcccaccagccctggccttgtcccccagctgcaggtcccagcctgctgtgttaaaagcaaccaaaccaacttttttctagagggtgagttacttggagtccagagtagcagggagtggcccatctactaagaccacagccagagtcctgagcttcatcctcgacacctctttgtgcccactccctaccctgggcagtcccgccacttctacccctgtgcaatgcagcctcctccagccccagccctagctctgccccttgcacagcccacggagcagagagtttcaactatgtcctcatgggatcctggcttcaattctgttcccatctgatccctctgtcacactgcccgagtggccgttcccacctacagatcggaatgggtcacattccctggcctaaactttgctgtagcctggcctggaccccagctcacctgcagccttggctctcccctccctgctacatacagcctaggagccccatgttggattttcagaaagatgccacactttctcacctttgggccttctgtaggaacagccccagctcaggtctagcctcccgcctttctacccctaatgcttagcttggtggagccctgcctacttccttgcctggcatccctgggcatggcagcctcttcaagggcggggaccatggcttgttcaccagataagctccttctgtgaacactcactgcctctccatttcccatcctcaccttctccagggctggctctgtttctgactccagcactaggccagctcagggctctttcttggttctggggctctaagccaaattggtcctctctcatcctgccacctggacacctgagctcctatgttggctgctgtgggtgggaacccacagccctttggttctttctggaagagaaagggagagacgtctccagtaagcactgccctcctctggagtccctgaacatgtatgtgacctccatagagctgtccacagagacaggggccacactcaggcccaggcaaagggagacgtaagcccagcctgagatgccccatgctggaggcagactgctcactggacgtgcccaccccactgtgtggtggctggccggggtggggtaggtatgaggtacagatcagtctgcagcaggtaggagccgtaggaggacaggaggaagttacatgcatcctccactaaggactggacagtccccagaaccaggccccttcagacccggcatgctcagctgctggtcaggaaggggagagctgagacctccaggcctgagctcctcacccctgcctggcctcttctctctgttgattgcctcagggaaagacaaacgacctggatggaccacaactttgctcctgctcctccagagatgcagtcgcatggagctccaggcccgggaacctccttctcccatagccatgtgctggggcgccctatccgcccctcgagactccctggaggagggtcccccctcacccccgtcctcaggaagaccatccatctggataccttcccccaaagccatatcccacagacctccagccggctgggccttggagccaggacccggagtgtgcccccacaggagacgggcatcgctctgggggcttccttgagccccctgcccaccagcagccttgtacccaggaagctcagctccatctccttgactctccatcagaacagccaggcacggtccctggatcgcccactttctcactgggaagagttgcctaccccaggaaagaaggctgctccccatgaaggagggagggtgtcctcgccaggctcgccacctgtgaccctagtgccagggggcagggtccactctgagggcccagggaacccaggtctgaccaaatccaacaggatgcttgccacggagaagcccctggtgagttcctacctagccttacctttccaatcccggttagcccagagtgcaccagtccttgcagagccaggctcgttgggccaggggcaccttgtctcagtgactgaccacatgcctaccagagcttctccaggaaaaggcaagccccgggccagggggatccccagaccccgggggcgtctccaaagggccaacacgactgtgaatttgactgctatggacacaaggacagacgcagccagacatttagccacaatggccaccaacagacctagcttggctatcaatttagccacaccaaacacatcccaactggacacaggcacagagttccctgccctggatatcaagctgggcacagccagagacttgtcttcggtagggacagtcaagtcaggcaaaaccgtgaacttggctacagcaggcacaatcaagccgggcacagccatgaatctgactacagttgggacaaccaagccagggatggtcatggatttgatagcctcagaaccagacaagctgggcaaagccatggctacaagaagcacagccaaaccagatatgaccacagagggtatagccatggattcagcaacatcagacccagtcaagccggacacaatcacagctacagtgggcaccagtaggttggaaacagccatggctttggccagagtgaacagagccaagctgggcacggctaagaattctcttgctttggacacaagcaggatgggcacagctgtgggttcagttgtgccagtaaccccagacccagccactgggaagaccacactgggcagtgttaataacctaaccatatcagacgttgctacatgcctgctaatgccaagcagatccacagacctagccctggacaacactaatgctgccatggacagagccacagagcctgcctcactggacctggccacagaatacaaaggtaaatgcagaaacttggttggggatggactaggctgccgggagggggaggtgtgtgagcttggagatggatcatgcttgcatgggttgagaaacggaggaaggactctaaggtcagggttgaatgggttgggagaaaaggaaatgggggttgtagggccagacatagggactgtaccctgagctgggttctaacctgccagtctgaggtcaggctgagggaaactatcagaaagaaggttttggccaggtgtggtggctcatacctgtaatcccagcactctgggaggctgagatgggaggattgcttgagtgcaggagttcaagaccagcctgagaaaaatggtgagactgtctctacaaaaaataaaaaataaggggctgggcacggtggctcacgcctgtaatcccagcactttgggatctgcccaaggcgggcagatcacaaggtcaggagatcgagaccatcctggctaacacggtgaaaccccgtctctactaaaagtacaaaaaaaaaaaaaaaaaaaattagccggacgtggtggcgggtgcctgtagttccagctacttgggaggctgaggcaggagaatggcgtgaacccgggaggtggagcttgcaatgagccgagatcatgccactgcactccagcctgggcgacagagcgagactccgtctcaaaaaaataaaaaaataaaaaataagggttgggcacagtggcgcacacctgtaatcccaacattttgggaggccaaggcgggtggatcacttgcggtcaggagttcaagactagcctggccaacatggtgataccccgtctctactaaaaatacaaaagttagccaggtgtggtggcacatgcctgtagtcccagctacttgggaggctgaggcacgagaagcacttgaacctgggaggcagaggctgcagtgagccaagatcgtgccactgcactccagcctggtgacagagtaagactctgtctcaaaaaataaaataagataaaataaaataaaaaattagcagggcatggtggcatgcatctgtggtcccagctactggggaggctgaggtgggagaattgcttgagcccaggaggtcgaggctgcagtgaaccatgattgtgcgacagagcaagaccctgtctcaaaaaaaaaaaaaaagaaaagaaaaagaaaggttaacaggggtaacttgtggaggagcaattatggtgagtcctcctttcagcatctcccgggattgtttgtttcctgaagacctggaataatcaggtgatcaataggtgtgtccacctttaaaagcagtggctcacacctgtaatcccagcactctgggaggctaaggcgggtggatcacgaggtgagttgttcaagactagcctggccaggccaggcgtggtggctcacacctataatcccagaactttgggaggccgagacaggtggatcacgaggtcaggagatcaagaccatcctggctaacaaggtgaaaccccgtctctactaaaaatacaaacattagccgggtgtggtggtgggtgcctgtagtcccagctacttgggaggctgaggcaggagaatggcgtgaacccaggaggcagagcttgcagtgagccgagattgcgccactgcaatccagcctgggtgacagagtgagactccgtctcaaaaaaaaaaaaaaagaaaaaaaactagcctggccaacatgatgaaaccccgtctctactaaaaaatacaaaaaattagccaggtgtgtaggctgagacagagaattgcttgaacccgggaggcggaggttgcagtgagctgagattgcgtcactgcactccagcctgagcgacagagcgagactctgtctcaaaaagaaaaaaaaaaaaaaaaaaaaaaaaaaaagcaagcctcctacctcctacgtgaaaatactgactagcgctttaggaagttgtgatttgtctaataggtagtctctgcagcctcctctggatgtgagataatgacctcactcgagactttccaaatccatttacgctcagccttttaggaaggtatctgttgcttaaaagttgtcttacctgaatgtctctttcttggtcccccacccccagccctttaatcctgaaaggtaagttggagccttgtatatatggaagtcctacacagaactctaaaatagggcaacacaagggctggacattcatttggtcttagaaagcctgtgacatgcctaaagtcacaccaaagctggctggtggcagtaagctgattggaatccagattgttaaaatctctactttgggcagcctcattcccaacatttcaagggctcagagtttttgggtctggaaaggtgcctagaaggcatccagtctaatgccttaattgagtcgttagattgtcagacccctttccctccaccccacacactcagtctgggcacctcacctaaattctggtcttcacttctccctacgagatctcagctctccctccatctgcagcccagccctgtctcctgaagtgcagatgtgggcagccagcagcctgctaggcttatctacccggatgtctcccgggcatgtccagaggtagcccttttcttcttgaactgactcctgcctccctgatctcactctctcagctgtaggcattgcctaccttttattaggtgcctagaaacccgggtatcctcttcttcctcatctctctcttgccatctcatccagtctacttcccaccttgttggtttacctcctcagtactcaactatctggctggctgtcccctcctctccatccttctgcccctgtgaggccacctcccacccaccagcttgttccctgtccacacacaactgctgcaacgactcccacattgaatggcagcactttcggcttaatattcgtcagtgactcaccattaccttccattaaaatccagcttccaaggctgcgtgcggacttctccagcctcttatttagctctacacacctgtctggaattttctctgcttcagcgacaccaaggactctgggctgtccaccagcaccacgcagctctcacctctggagaccctcacctctgctgtcctctctttgcagaatacctctccctttccattcttcccttccactcccatttgcctttccatctggccctcatctcctccaagaagtcttccaagccccctctccccagggtgcccacctgcctgcaccctcagttccctgtgtgcaccccggcccctgcattaggacattccatcttcctgtctcctccactagacccagaaccttcgaggggagggatggttgtcctcacccctgtgaggcaatatgctgtccattagtatccactgaatgcgtgaaatttttttctaatgggcaaactgaggctcagagaagttcctgtctggctcaaggttattggttcatcattctggagcagggcctggaacccgggcccctgactcggctctacaggcacccgcgcaacaccccagcccccgcgtgactcacgcgcgctcacggccgcccgcagctgccactggtcccctgcgcccctccgcccgtccccgccgcagcccagtgggtaaggggcggggagcaggtccagcggggagagacgggactgggatgcaggcacctttccgggcctggcacctggagcccgcgggggcggctcctggaccgcccgcagcgtggacccgggaccagttcccgcttgcgggcgcgggcgccgcgggaaggggaggggccctcggcggggccgacgggcgcgcggtcacgtggtgcgggtggcagcggcggcggctggcggcggcggcaacggtgcgcgcggacaggggcggcgcggcgccgagcgagccgaggcgaggtcccggggagggcgcggcggcgcggggcgcaggggcggcgcggcggggccgcgggccgggcgggtgggaggagagcgcgaaggggcgaggcccgtttgcaggggccgctcggcccggggaagcccgcgccccgctcagccttgcagccccgcgcccggagcatctccctggaggaacggagacaaaggaggattcatgtccaaaggtagggcggccggccaggccaccggcacccgccaggaggaggctgcggccccggccagcgcggctggaggcgctcctgggggagggtttccgcgccgaggagcccacgcgcggtgacagatgcgcggacacacgcacacacggtggcacccacctcgagagagacaatcttggagagaggcagacataggacgcggggagacgcagggacccacggacacgcaagcagggacccagatgcgcacagaaagccccatgctggagtacaccaagacacgcacacacacacacaccacgcacaggtgccagggccatgccagccggatgagagacctgtgcactgatacatacgtcccctcccccgcaacccctacaggcacacgctgagacaggcaccagctggtggtctccaagggaacccgttggcctccagaggactgggatgggggaacgggtgtcccagggccctctgctcctgcgaatgggaaaggaccgagagagctttcgtgattccttttcccagagcctagggctggaactggggtgggctggaattgcctttgtggggggcggtggggtcctgaaggctgcggggggctgaggaagatccatcttcagggtggaaggaagagggggggcctgcactaagcaggtgctattttggaaaagtaccctcccccagctgctaccttcctaacacaggggtggggtccctgggccagacaaagccaaagccattcatttgcctgtaaaaggaagtgccagggtctttgcttagcatgggaatggaggggctgtttcttggctgcaaccgagtcaggtggatggtgcctctccctggagcactgatggggcaggtagcttctggcagagggtgctgcaggcagatcccccttctccaggggccctaggagagccaggagctgaggggggccccaaggaccatctagccaggatggcagacttgagctgcaccctgctgtgacccgagctcttccccacccttggggagcccccctccaatccttgttgcagaggaaggaggaggtctcaacaattctactcccttgactgtggcggagacaacagccattgctcactggggggtcagctgctctgcatggggagaagcatctgagggaagagaaaggtgatgtgtctgatacctgcctcactctgaagttctcattcactcatcattcattcattcacttattgaggagtgcctgtggtatgctgggtagactggggcacagagatcaataagacacggccccgccctaaagaagggtgagaactagtacgtatttgtgccagataatttacattcttcattctgtataaccttcatagaaacccagcaaggtaggttctatccccagttgtctgagcagaaaatgaggctcataagggtcacccagccaggattcaagcctgggtcacctgcccatctgacgttgacatggtgggaccaggggagttgtagggacagaggatggaactacagaatccagctccagagcagcattggttctgtgccccagaggtctttgtttatttgtcaggcacccttaccagacagggggccctcaagggcaacaaccttgtctggggtacataagtgtccttggaatttcgcctagggcttggctggtgtagacccccatttgacagcatatgaaatggcctagatgggatggaatgaatgaatgagtgaatgtgatgagtaccagaaaatgtgcagtgggcacagaagagggccatccacatcagaaggcaaagcagaggctttcctgggagtagcagtggggctgaatgctggaggaggaggaggaggaggaggaggaggaggaggagggagccaggggttggagggggaacaggatcttccagcaaagcttgtggcacagtgacctgcacacatttactgtacttggggctggtgggtggcttgttagcatgtgactggcatgtcactggcatgtggtggggaggctgacttgccagcaggcgctgtgtacagtgcacacagtgggtgctcatatgtgcttgttggaggaatgaaagtgagatctaccaggtcctggtcctgtagtgggcctgtggtagcccctagatgctgcttggggatctggtaggaccctctctccatcagggtctatcttttgggcgtgctcttttaggatgctgcagttgacaggccagggcggagcaggccatggtgagagcacacactttataggaatctttacacaacctctcataagtaaatacaaggcatactttccaagtctgtaaaatggggataagaccacccccccaaaccatgtggctctatcttataacacaggttgagaccaaatgggctcagctgcagaggcataaggggcaatggaaaggcccagcttgtgtgagcagctgggcaggaaaaatggggcattggtcccagtgcaggtgtgctgagtggggcctgtgagccacgtgcaagagtggaggagcagggccaggctgctgagagtcagctgctgcagggctgggccaatcttgctgccatgcggagctgcctggctgggaacagcttcctgggaagcaagagagagccatgccaggccctggggaggtcctgaggctttggcagatttggctgtgcctgggagtgacagaagaaagaacagtttcccattgggagagagggtcttaccagtaccggtggaaggaccaggtggagggagatgagagtaggctcctggctgggtttaggggtgggaagggaatacttctgtcccctctccctcccgcccatctgctgctccatcaggcctccctgtaaggttgagactctgcagggtgttagtcatgaaacataggattctagaacggcagagctggaaggtgtcctcaagagcacatggagtccaacaaccatgcttgtgtaactggcatctggggacaccttcctttaaccaatgctttcacatgtactgtttcatttcccctacagacctgaaaggggctggggcaaaagggtctgggactgtaagatattgctcagtgccttttttttttttttttttttttttttggagacagagtttgactcttttgctcaggctagagtgcagtggcacgatctcggctcactgcaactccgccttccgatttcaagcaattctcctgcctcagcctcctgagtagctaggattacaggcgcctgccaccatgcctggctaatttttgtatttttaatagagacagggtttcactatgttgatcaggctggtctcgaactcctgacctcatgatccgcctgccttggcctcccaaagtgctgggattacaggcgtgagccaccgcgcccggccattgctcagtgcttctaagcatcatgtctcatgaaagctcaccacagtcttagtgatgatctttccattttatagagagggatgcaggctcatagtggggaggtggtcttcccaagtccacaaagctgagaagtagcagagccaggctctttccacttcaccccataccccaattgtatggatggggaaatggaggtgctctattctggaacctgccctggtggacagtggcctgataaggaaacccacagatttctcctgtgtatgaacacacccatgatccactaaacccagggggacgtttgcccttcctcactagggaggggctggttcctcagccttctctttcatctgctatccaccactccaagagcacactgtgtcgtcttaggcaagtgactgccctcatctggttctcatcccctccccactggttccacagattcagaacaatggctgggagggtgtctgggctccttcaggtacagacacccctactctgcagtggtgctcatggtacagaggggacatcgaggctgggagacgagagtgatagccactctccagagaagggtagccctgtttgcttctaaaagatgaagcagccgaggtcagtgacagttaatagatgttagtgcaggatcctaaaaagtctttgccctttattcggggagggaggcatgactcaggtctgaacaaccccagacatttcttagaccagtggttctcagccagggcaatggtgcttcccaggggacatttggtaccatctagagacattttgggttgtcacagcctggggggctactaagatcaggggtgccactaatcatcctgtaatgcatgtgacagcctcccacaataattactcaaatgtcattagtgccaagatggagcagcccctgggttagatgcacagatgtgggcttcagagcagtgaggtgcatttgaaagtgcccagcaaccagagaacctggcactggcccagattttacctctgacctgctctgtgttcttagttgagttctttctcctccaggcctcagtctctttgtctatgaaatgagggacctggactggatgatactaagatcccttccaggcccaactttgtatgattctgtagcaagagaaaaataccatggtttccatgtgacctctgccgtcctcctgatcacccctccgacccctcccaccttggctctgcagggctcccagagaccaggacggacgcagccatgtcagagctggtgcctgagcccaggcctaagccagcggtgcccatgaagcccatgagcatcaactccaacctgctgggctacatcggcatcgacaccatcatcgagcagatgcgcaagaagaccatgaagaccggtttcgacttcaacatcatggtcgttggtacggaaggctgtggggctgctgcaggcctggtggcgggcagcaccaaggatcccatttctttcccccaaatggctgtgaccctggctcttctaagatgagctgtttgtagaagggagaatttcaccatgctgatcacaaaggcctgacccctgtctccccttaagactagctgacccaggggtaggagcttcaggtggatgccagcccagccccccatcaccagctcggtgtacacaggcagccccttcaccactctgatcctgcttttgggtttgtgacatgagagaatcagcaatgttcttccttacctctgagagctggtggaaggattggatgaagggtggtcttatttctactcttttgtagtgctttaaaactttgagagaaggccgggtgtggtggctcacacctgtaatcccagcactttgggaggctgaggtgggcagatcacctgaggtcgggagtttgagaccagcctgaccaacatggagaaaccccatctctgctaaaaatacaaaatcagccaggtgtgatggcgcatgcctgtaatcgcagctactcgggaggctgaagcaggagaatcgctcgaacccgggaggtggaggttgcagtgagctgagatcacgccattgcactccagcctgggcaacaagagtgaaactccgcctcaaaacaaaaaacaaaaaacaaaaaagattttgagagaatttccagggatttggtcactgagtagcatcactgcgtcacagaatgtaagagtaggaaggggctgggcatggtggctcacgcctgtaatcccagcactttgggaggccgaggtgggtggatcacctgaggacaggagtttgagactagcctgaccaacatggtgaaaccctgtctctattaaaaatacaaaaaaattagctgggcatgatggcacatgcttgtaatcccagctactctggaggctgaggcaggagaatcacttgaacctgggaggtggaggttgcagtgagctgagactgcaccattggaccccagcctgggcaacaagagtgaaactccatctcaaaaaaaaaagaagaaaaaaaaaagagtaggaagggacctttgccccgtctcagtgagatgtccagtcagtgctgaaaaaggaatctggcgtcatccttctgtcctcttcctccttcatcccccaatcagtcatccagtcctgtccattttacctcatacgtatctcttacgtctgcccacttctctcctctctcttgctgccaccctatactgactttctctcacctggcttgccgtggccacctgactctgtgctgtcaaagtgctgacctgcagcaagataagctcagctggggcttgggccagagtataaatcatctggaaaatcttgctataaaaaacctccactgagctaaacagtgtgctcagtgacaaggtagatttctctcctgaggcagacttcttatctcaagaaccagtagcaaatgggtcagggaccctggtagctgggcccctatgggccacactcggagtggcaccaaccctcctagctctctgtctcctttcctctccaatcccttgtccaccagtgaccaaataatcttcccaccttgcaaaacttatcgagtcacccaacttacttaaaactctgtaacaaactctcctttaacctcagggtaagtttaaactcgtagactgtcctgattgtacctcttcagctcatctctgaccacttcccatctagcattgtactcctcactcagaagaggcagtgctcgtccacatgccatgctctctcctaccctagagcttttgcatctgctgttccctctggctagaactcatgactcttttgaaatcaaccttccggtttcagcttagttgcatttctccagaagtcttccttagtcccagagagactgggttggattcccttggcaatgctgtttcaataccctgtggctattctctttcacagtggttattgcaacatactataattgtctgcttatgttttggtcactctcacactaagcagctccttgagggtaaggatcatgttttgttcacgatagtacctccaaattttaggacaacacttggcacctaagaataattaatgaatgaatgctcttagaaaacatctcagagcaagcatggcaaatccaacacccgtgagccacttctctccccagtggtgtgcatggcagactgctagtcagtcatggcacgtgttcagtgctgagcccagatgtagcctttttaacataatggtctaggtgactactaccagataatcagcaggaatgagaaatgcaccttatttaccatccctggtcttgtccaatttcctctctcctcaccatcctatcagtaaagaaaccaaggcatgactaatccaaaggcattcagggaaaacaatgcaggtgggtctggaactctaggcccttgtcccccagcatggttctttttctaatataatcacaagaattcaccagcccagtatttcttagatcttattgtccataggactcttctggaagcccagttaaaatgcagattcagaatcataggtctggggtggggcctgagattctgcatttcctactagtgtccgggcaatgccgaggctgcttgtcaattgcaagtctttcttgtgggattcttgtacgtgttgaagtttgagaagctctgctcagaccagtgggtttgtttcttttgagacagagtctcgctgtgttgcccaggctggagtacagttgcgtgatcccggctcactacagcctctgcctcctgggttcaaacgatccgcagcctcctgagtagctaggactacaggcatgtgccaccatgcccggctaatttttgtatttttagtggagacagggtttcaccatgttggccaggctggtctcgaactcctggcctcaagtgatctgcccgccttggccttccaaagtgctgggattacaggcatgagccactgcacctggcctgaccagtggttttccctttttttttttttttttttttttttgagacggagtctcgctctgtcgcccaggctggagcgcagtggcgcgatctcagctcactgcaagctctgcctcccaggttcatgccattctcctgcctcagcctcctgagtagctgggactacaggcgcctgccaccacgccgggctaattttttgtattttttttagaagagacggtgtttcaccgtgttagccaggatggactcgatctcctcctgacctcatgatccgcctgtctcggcctcccaaagtgctgggattacaggtgtgagccacggcaaacggcctgaccagtggttttcaaatgttctttagctgtgaaacttttccttgaaatgaaatcttctgcagatatgcatctggaaaacaggtgaaagggagccatagcgaaggaagtggatgcaggggccctgcctgcccagcctcctcctcctctcacagtgccctctctggcatgtatcttcacaggacactaaggcttctgggagcacaatctaaaaaccactacactagaagaaagagtggatatagagccaagatgttattagggtttgagttcctggtcttgcatgtattagttatgttgctctgcacatattttgttagaagaggattcatctctctaggaccatctcaactgaggataaagatagttctgcttcaggatccacagggctgatataaaaatgaatttggctaacaaatgtgaatgtacaatatgcactgtgaggcagtatcaggatgcaaagtcattctatttttccttttagtatcattaaaaagtgaaaacctaagcaaaaaatggaatcacgagaaaacagaaaaccacgacactagacatatgcagaggttgtcccttttcccagtggtcctgtggctctgggaaggagagaatatggaatccaagtgatgtttccccaaggccctctgcagtaagcaggaagccattcccacctgcctgcaatccccactcagcctggccatcccccagtgagtggtcagacaaggtgtggcctggatcatggctctagaattctgtaagcttatggagaaatattaggctcaggaggtggatgcagagtctccctacctcctcctcctgctttgctgtaggccagagtggactgggcaaatcaacgctggtcaacacgctcttcaaatcccaagtgagccgcaaggcctccagctggaaccgggaggagaagatccccaagacagtggagatcaaagctatcgggcatggtgaggaccaggcagggacccctatgggctttgttcagtgagtgcctctgctggaaaggggaaagaatggggcttattgaagaataagatcaataaaaggcaaccttaagacaaaacagacgtgagcacttcactctgaagcaaactccttagactgcaggttcagggaagagagagcagggagctcgaatggaaggaggtgagatttgaggtggatgataaagtacaggatttagacaggtagaaagaggtaaggagtgggcaggtacggtggctcatgcctgtaatcccagcacttcgggaggccaaagtgggaggatcgcttgagtcatggagttcgagaccatcttggtcaacacagtgaaaccctgtctctttttttgtttgtttgttgtttgtttttttgagacggagtcttgctttgtcgcccaggctggagtgcagtggtgcgatctcggctcactgcaagctccacctcccgggttcacgccattctcctgcctcagcctcctgagtagctgggactacaggcacccgccaccacgcccggctaattttttttgtatttttagtagagatggggtttcactgtgttagccaggatggtcttgatctcctgagctcgtgatccgcctgccttggcctcccaaactgctgggataacaggcgtgagcaaccacgcccggcccgaaaccctgtctcttaaaaaaaaaattagctgggtatgatggtgcatatctgtagtcctagctattggggaggctgaggcgacagcatcacttgagctggggagttcgaggctacagtgagctgtgattgcaccactgcactctagcctgggtgacagagtgagaccctgtctcttaaaaaaaataaaagaagaagaaaaagaaatgagtagagagggtattccagattccaggtacagggaacagcataagccatgatatcgagatggaaaagaccctaaatttgacttttccaataactgatcctgaagacaaggcctgggtctccctggctagtaggctgccaggtacctggggtcagctgtaggactgacctctctggtacattttcttttcacccccagtgatagaggaaggcggtgtcaaaatgaagctgaccgtcatcgacaccccaggctttggagaccaaatcaacaatgaaaactggtatctgtctgcctctgagatctttgccctaaagactctgctgggaagatacttactatggtgcagattcattcacgttgagaaccatctgcaccctccatgctctgtagttcccgacagcccaggccagggcccctggggagctccacccctgctaactaaccatccaggaaagccatcggtgcgggggctgagggggaatctggcagcaggtatcctaggcccaccaaccagggaatgacatgaatgtaaggagattgctaccagatcatgcctaagctgagccctaggtcttgttcttctgatgcatctatctactttccctccccatcagctgggagcccattgagaagtacatcaatgagcagtacgagaagttcctgaaggaggaggtcaacatcgccaggaagaaacgcatccctgacactcgtgtccactgctgcctttacttcatctctcccacaggacactcgtatgtaccaaccctacccctattgtcaggcctggtctggtttgtatcatctgtgcccatctggattggatgatccatacgttgactcagctaggcctccctagctgagtcctagcccttccagccagatgggttggtacatagtcatggcccatgaccttgggattccctagactttccacgaggaagtttgactttcttgctaggaggttaaagctgtccaacatcagccaccaatatctgcccactggtgtcccagcagcatggcacaactgtatcagcaaagaggacttggtgaatgtgagcagagggcacttcatttattcaccaaatacctgctttggaaaataattggagtcggagggagcagcaagaagggtgaaatagggcagtgcagggctcctggattggggctggtgtttggagggtagggacccagttgtaggcatttagaaggtaccagcctggagtgaggcattgtgtgttcagagatgaaggccaaccattgtcatgaagtactatctgataggcagaataagacacacacaagcatgttgggaactctgattgtgagtgacaggtgggccccatgaaggaagtgctgggaacaggcagaggatggagatcctagggggcaggccagaaaccttcctgcagagaccgggggaggggggtcccataacattactaagcccagctgctgggccagagttaagctcttcagaggatggcacaagcaaggtaagccccaaattttctaggaaccaggcagtgatggtagggggagaagagagatgaaacaagacccctgggctagacccaggaactcaacagaaggctggttttatccctccctaggcttcgaccccctggtcagaatgaaccatcagacagactgacttagtgagtccctgagattgcaaaatagagccaagttggggtctcagagcctgaggtaggatgggggcatagactgtcagattgtgggaagggcaaggcctccagtttggccctgcaggactaactctgggggctaggaggagacctgtcaagaagtagtctgataggcagaacaagatgtacacactaggcacggtggctctcgcctataatcccagcactttgggaagccgaggcaggaagattgcttgagtccaggagttcaagaccagcgtgggcaacatggcaagacattgtctctacacaaaatttaaaaattagccagacatggtagtgcgcaactgtggtcccagctcctctggaggctgaggtgggaggattgcttgagccctggaggtcaaggctgcagtgagccaatgaccatatcactgcactccagcctgggtgacaaagtgagaccctgtctcaaaaaaaaaaaaaaaaaaaaagacacacacagtgttgtttttttttggttgttgttgtttgttttttgtttttgagacagacaaaaaaggaaaaaagacacacacgcacaaggacatatgagtagagacagtagtccacagatgctcccaggagaaagaaatccctgagtcagaaaagatgtcctgaagtggtggtttgaggggggcttaaagagaggcagaatctgcaaggggactgaaaaagaaaaaggcaggtgttgaggctgctctacagacggcaaggcagtggggctgtgtcggagacgagaggtagcagcctcttggcctcagccagatgcccagcccagtcctcttctcctgtgggtgtcctggagtggtggtggtggctgagttggggagggcaaggtggctctgatgattctgccttttctgtgccccagcttgcgacctctggatcttgagttcatgaaacacctcagcaaggttgtgaacatcatccctgtcattgctaaggctgacaccatgaccctggaggagaagtctgaattcaagcaaagggtgagaaggccccctgtcttcttttcctgttcccatcccctcctttctctccgctgggttcaggccatctcctagccctcatcattctgccttcacccccaccctcaaccctcccccaattctccaccccagcccccttcttaaccattcaagaggctgaggttggtggtatctggggactatgatgaagaaaagatggcacagctctgggctgccttcttcccaccctccaaacctacctgtgaagaccactgaatacatgtatcactgtgtacataagaaatcactcctccaacgttagcctaattgaagggctagactaattagtgagtcaactggccactagtcctcactggcatcttctctttgttttttttttggagtctctctctgtcgcccaggctggagtgcagtggcgtgatctcggctcactgcaagctccgccttacgggttcacgccattctcctgcctcagcctcctgagtagctaggactacaggcacccaccaccacgcctggctaattttgtttttctctttttagtagagatggggtttcactgtgttagccaggatggtctcggctagtcttgatctcctgacctcgtgatctgcccgcctcggcctcccaaagtgctgggattacaggcgtgagccaccgtgcccagccctcactggcatgttctataagctcagccctgtgctggatgtacagggttggggaggggcgatttgagagaaatgaaaagacaattgctgcctttaagaaatttacaatccagttgggcgtggtggctcatgcctgtaatcccagcactttgggaggcagaggcgggtgaatcacgaagtcaggagatcaagaccatcctggctaacacggtgaaaccccgtctctactaaaaatacaaaaaaattagccgggtgtggtggcgggtgcctgtagtcccagctactcaggaggctgaggcaggagaatggcatgaacccgagaggcggcgcttgcagtgagctgagatcgtgctactgtactccagcctgggcgacaaagtgacactctatctcaaaaaaaaaaaaaaaaaaaaaaagaaacttacaattggctgggggcggtggctcacgcctgtaatcccagcactttgggaggccaaggcgggtggatcacctaaggtcaggagttcgagaccagcctggccaacatggtgaaaccccatttctactaaaaatacaaaaattagctgggcgtggtggcatatgcctgtaagcccagctactagggaggctgaggcaggagaatcactggaacccgggaggtggaggttgtagtgagccaagatcgcaccacggtactccagcctgggcaacagagcaagactcggtctcaaacaaacaaacaaacaacaaacaaacaaaacttataatcaaatagaaaatgaagaggtcctggatggtttcctggagaaggcaagacttaagtcgaccttgaaagagggcaaacagtctcggagtagggggagcctcacctttcttccttccaatcaggaatataacatgcaggggtctgagcactccccagtgggctcacctgtgctgcttgtgtaaatcccagtctcgcggaccctgagatgagcaagctggttgcgaggcgcctgggacctgaagttgcacctcctggcctcttcctcctctcaggctaggttgtaattgtatagctggggcttgcatttattcaccatcttcctgctgctcagggtctcagagttcagagatgactgtggattatccaaggctggatttggctctctgacctcagctcacgcacacaggtgcacacacccctcttttccattaccctgacacttgactaccttgtttcttctcctcgcctctaggttcgcaaggagcttgaagtaaatggcattgaattctacccccagaaggaatttgatgaggatttggaggataagacggagaatgacaaaatcagggtgggtgcctggggcactgctcctccactgatgcccccttgcgacctctgggatgtgtattgtgcacgtcctctgtctgtcttttccctttctgtactccccccaaccttgcctgacccagaccagaagtgacatagggggatggggaggactatggccctggactgtgaacccacagaagggctccctgtacccagaaagccttctatccccagaccacataaaagcctccttttccccaacaaggtctggcaaaaacagtatttggggtgatgggaggggcagcaggcaggaagagcatcaggctggggtccaggaggatctatgctgtggtcagaccctgccttagtttcccctctatgaaatgcaggggttagactgagtggcttataggcttcccccgctagaataacttaaaaaaattaaattggctgggcgtggtgactcatgcctgtatcccagcactttgggaggcctaggtgggagaatcgcttgagcccaggagttcacgaccagcctgggcaacatggcaaaaacttatctctacaaaacctgcaaaaattagccaggcatggtggcgcatgcctgtaatcccagctactcgggaggctgaggcaggagaattgcttgaagccaggaggtggaggttgcagtgagttgaaattgtgccattgcactccagcctgggcaacaagagcgaactctgtctcaaaaaagaaagtacaaagcgctctgcagctgaaggagagctgattcctgaggttaaccagtgaggcagtggtacaattgggactagacccaggactcttcaatctcagtcgggtgctcttttcaagagactgagccttgcccttgccatcagtagtatctctgaatgagcatcagaagtgtgtggttcaaggctagaggaccatatgccatcctgctcctgaaagtccaggttgttggaggatgacggtgcacatgtgtctggtttgtgtttctgccccgtgcagcaggagagcatgccttttgctgtggtgggaagtgacaaggagtaccaagtgaatggcaagagggtcctcggccgaaaaactccatgggggatcatcgaaggtaattcactgcatcttctggaagaactggttgctgatcagttatccagtcaccatttattaagcatctataggtcaaggcactgtctcaggacatatgaaatgaatgccagccagattctgcccataaggagcttacagtctcattgagaagacgatgctcacaggcaggagtaacaagagactgatttagcacctgactgggtggcactgacttagcgcatcaaaggagttcagaacatggagagattagtaaggcctggaaaaactggagaaaggttttcataggaagggggatgtgatctgacaaactgccggagggttgttcaggtgttgccatttccattttattatgaatggatgtgaccctgggcgggtcttgatgattctgaaagtggtcaaagaatcactttaatgatttcattcaatatgataaccctatgaagggaggagagcgggtgctcctgttctcagagtataagctaccaaagcaccggaagctcaggttaaaagccttgtccaaagcacataacttgttagtggtgaaacttgatttcagactcagattttttttttttttgagacggagtctcactctgtcatccaggctggagtgcagtggcgcaatctcagctcactgcaacctctgcctcccaggttcaagtaattcttctgccttagtctcccaagtatctgggactacaggtgcggaccccgatttttgtattttttatttatccccaaaaattagcccagctaatttttgtatttttcgtagagatggagttttgtcatgttggtcaggctggtcttgaactcctgacctcaggtgatccatttgccttggcctcccaaagtgctgggattacagatgtgaaccaccatgcctggtgattttatttttatttttaatagaggtgggggtctcactgtgttacccaggctgatctcaaactcctgggctccagtaatcctcctaccttggcctcccaaagtgctgggattacaggcatgagccacagcgcctggccccatgtcttaatcctcattctgttccaacagtgcttggccaatgatttgcaaatactaggtattcaatatatgttgaattggatttgtcatgtagtgcatgacctttttaaaatggctcaattattattttctctgtgttacttccaaccggattataagcttctgaagaatgggaagtgtatcttaggccttggccagtttctcagacttggtattagttttctcttctataaaatggtaaaaattatagtccctcttggctattatgccacagcgtctagaaggatgtcgtgcccattgtagctgcttaatatttgttcaatgaatcaaatccagtacacccaagtgagcaaatctctggaagggttacaaaaaatgacctgtcccatagctttctcctaaatgcctccgtgacccaaacagaagctcacctcctgggtgttgctgtattaatgaactgactacctgttttgctttgttttgttttgttcatagtggaaaacctcaaccactgtgagtttgccctgcttcgagactttgtcatcaggtaagatgtctcccctccagctgtccagacagcaggttgaattatttggggtcagggtctatctgttcagattcacctcctgcatctccaggtctctctgacagagctttctgccccagttccagctcctgttgcaaaatggaaggtgctgtagaagaatccttagctcctgggagtggttcccattcactgggtccagtccctcgaagtgatgtgtgtcaccgcctcctcttcctgcccctaattgcagccctcttcttctcaccctgtgtcctctaggacccacctccaggacctcaaggaagtgacacacaacatccactatgagacttacagggccaagcggctcaatgacaatggaggcctccctccggtgagcgtggacacagaggaaagccacgacagtaacccatgacgaccacttctctgtgtcatcacacatacccacttcacacacacacatcccaaataccaccaccaaccaccttcttcctctcaactctgtcccacaggcctgtctggtatttgtggagcatcttgtctgtgtgtgtgtgtgtgtgtgtgtgtgtgtgtgtgtgtgtgacagagagagagcgagagagcctgtgtgtgtgcatgcaggggtgaggtattttcactgccctccctggagagtcccttgtaagtttggctcctccatgcctgtccattatctgtctcctttccttgtgtcccaaaacaaagctgtttgcctcactcaggagatctgggggaggtttcatttaaaagtgctgggagcaggtgagccacaggcaactcttctctcggaacctgcacacaaactggggctatagagattctccaaggacagatggcagtggagctagacctgagtagggggcagggagttcaggacaaccctcctgtaagttgggggtggtctgggggtaaggctggggcttcctgggaaaaggaaggccatgagaaggcagagaagtaggccagagctgggttcttgcagaaagcatcagtgcctacaaatggagctccacccttcagtctgtgtcgtgttcagtgtcacaaagctaccacctgtcaccagagcctactgctgctctccactcaactggcctctgctgccaggccactgcctgtctctgcttccgactttgtcttctttctccctttccctccttccctcatacattgctttctctccctctcctgcgtgtctctgacatctctcacttccttttagatgaatctactttaggttcattcctatatttagcatttatgcccagtctacttccagaaatgactttagactgcctttcacataaaatcacaaaactacaggacagtacaaacagattgccagagaaatctgggtcaaagaaaggaataggaaagaaagtttctgtagtcaagcacctgaacaggccctgagctcacaggcagccaatgtaaagagggaaacacagtgagttatgcagttcccagtgtccagttaaaggaagcacacatgctagtcatgtgagacaaccttttattgggacatcaggttctagaactaattctaaagaagtatcagaaacaatatacataatttgtctttcttagtaatttggcttcaaagacaaatttttgaccacacctccgttttctccgtcagacttctctcccttctaagcaggcttctctgttgctccatttgcttcatacatacttgacctctcttttctattccccatcacttttgtgctgaagctaatcatatttatgtctgtctttctctacttttccctaattccctctcctcctgactcctgtagacattcccaatgatacccaccgtcatacatttaggcttttcttgcctttccctgaagccctgtatttattaatgcatatatttcccctgcttgttgtacaagtaagttactcttttcctttaatctgtaagattcatgaaattcggggccagggaaacagtttagccttagggaagggaaaacactaagtgaaactgtttacaataacctcatacaaccttctgtcccatctcctggttcagcctaggtgtttcactggtcctctatgaatcccagcacttataatcccagtcttttatcactcaggtgctaggaaaaaaaacatagactcaagacccaagattcaatggaccaggagaaaggggggcggtgatcaggtcaccagtgaccccaacctatgctctcggtctttcctggaggctgccaacccagccctcatcctcccttgctcacaaagttacagggtaggcacctgtcaggacagaacagcagcagcgctacagcccagaggttatacatttcaacagaacagggatccttggctactgtagaagcagtcctgtatggagaccttggaccagcaggggaagatctatgggcatgggaggtgggcgttggaaaggctgagtaggaatggtgcctggcacccctgaaccatgatctgagcctccctggagaaggtattttatatgtctgctgccagctgctggtctccacaccctcaaccgttctcaacccccctgcagggagaaggcctcctgggcactgtccttccacctgtgccagccaccccctgccccactgctgaatgaaggccatttcaagcgctgcttctcactccattcctctcagctgttattgctgcagggccaagccctttttagtgctgtgctcgtccagctcaccaccacagcccctctcagccctcagtaggtgggaggggccagctgcctctttaggccagttgcatcctccatttatccaaaccactcctctcctcccagtggagtggggttctgccagtacagccctactgcatcatctgcgtcagccggtcctagcccatctgcagggtgaaagaactcatcaagagctccttctgcccttgtaagcccatcccagctacttgtaaccatctctaagggcaatggcattgctccctacccattcatctgcatgagctactcttggcttccttaaagggtcaagaaagcaatttttctgcttactagattcattgagatcagctgtgtgagccccaaagtgggacaagggtgtctccttcattacttaaagatattcatgagggtgggtcactacagatgttggggagcaagggctaggatcactttttaaaaaatcaccacttgtggctgtcccagagtgcggttgtacatcctccccacctcataacgcagccactgaggaagagtggttttcctaagaagacattgctggagttgactttcttctgtccaaacaaacaaacaaaaactaaacacacacacaaacccccagaaacccacaatatgtacacgctaaggaaaaactagcacccttctgtccactcagcaataagagggatctcttcccacctaccctacctactcctacccccaacccccttccccattaatgtgagtaatgaattagcctgaccacaggtggtcactgtaggctaatggaaaatacccaagggagggcaaagccccccatcagatgcatgaatgtttgcgaatgttgactgccactgccccacacactgtgtctttatagaattcccctttgcccaccctcttcctgtctccacctggacacaacttgctcaaaggctggtgacttgtgggccattcatctacaaccaagtcctgatggagcaagaggcccacgcctaggggatgcaagaacaacccgtttcttaaatgttaccagtcccagccaatcttacggtgacattacagttaaatttcccaattgaaaacaagcaaacagacactcaaactggtcctgtaattgttgctagactttatgtgttgtacaactaaacattgctgtttgaacagtaactgcctggcctgtcttatttgtgctccttgaccaaatcagccattatgtcatctcacccatgtgtggagggtgagactctcttggtaagaaatagccacagatattagagatgaaaacactttgtgaggtcagttcatcttcagttggcgtcaggtcgggcctcagtcattattttctagtgtttcataaccaaagtgagtaatggatgggaggttgaggtgggaagatggcttgagcatgggaggttggaggtgcagtgagctgagatcattcctgacaggaccaacccaagtccatacctaaaggcagggggctaagggggcaggtgaggtcgggaggccactcacctatcactcaccccttcgcgctcgagccaattctcagggcccgcctctttctcccctttctcggcgggggcctctaccctgactccgccccgctccccgggcactgccccaccacgtgacccggtctcgctcctcctcctcctcctccttacgtcataatctccgccctccccttcagaaccgcgccccacagctcggcgcaggtcccgcccctttccatctacggggcggcaggaggcccgaagcaagatggcggtgaatcagagccacaccgagaaccgccgcggagccctcatccctaacggtgaaaggtgcctgaggggaagcacggcgtgctgtcggaggagaggagacgaatgagatagacatggcggctcgcaaactctcagcgagtcagggactttgccgccttttttgggcgcggcgctcttagctccgcccccgacctttgggagcgcgcgcccctcactggtgttccggcatgtggaggtggcggaggccggaacgcgtggcctcgcgcgtttgaggggtgggggtgggaatgcgccttttcaaggcgcggggcccagacgcatgtctcctcagggcggggcggggagggggtgcgagacgcgtgtgtccttcgaagagaggccggagctgaccggcggttgtgagcagccgggggccttcggtggcagcgtggctgcccttgggtgcctgcgactttgttggatgaggacaggtactgggtgtgtatctcctcctacttccacgaacaaggtgtcgctctttggtaagagggatgaggaggtcgagtgtggatcattctggaaagatctcaaactgttgtggggcttctccttggacctggaaactttctaaagccatgtttcctccttgctccaaccagggagatgtctgcttttaaaaacaaaattgaaaaaattgaggccaggtgcagtggctcatgcctcttatcccaacagtttgggaagctgaggtggcccaggagtttgagacaagactgggcaacatagtgagaccccatctctacaaaaagtagaaaattagtgggccatggtggtgtgcacccataatcccagctgcttgggaggcgatggtaagaggattgcttgaacccaggagtttgggctgcagtgagctcagattgtaccactgcactccagcctgggtaacagagccagatcctgtcttaaaataaaagatgggactgaacagatgcctgggcacaacaaagcactgttggtcgcaggaagctgtggggcttacaccagttgctttgctccttgcggtgcctgctgctggcccctgagctctctactggagcagactcagccagaggggtgcccatctccaccttcaagcacacttgttcactaaggcctgactccactgcgctcacctctttaccccacacgccccctttcccgtttcctacactcaaactcagtctcccccgctgtgcagttctaaattgcgctcctttctgggctctgacttgccctcaatttccttttctcccaaccagcattgaaactcaagctggatgatgtgcttggggccagcacactcaggtcagtttgaatgtagttgtcaggaagatcgaagtagacgttaccaaatgctgatatccaggtctttcttctatctttccttcctccagaaagttttcttgacagatttatatgggccttagaggttgtatgttctcacctgcttcctacgtacctctgctgctttgttccattttgtggtagatgattgctcaccactctgacagtggtgtccccgtgagcacttactgagagccatttgagcacttgtcattccatggtgtgaagcctttcttttcttttcttttttcttttcttaagatatttttatttctccaaatttgttatttattaggagtgactgaaataaaaaacataattgagtcccatcatcatcatcatcatagaaatggctttaagagaaaactggtcagatgactattattgcttcccatttccaaccagtgaatagttgccactgataaattgacagcgaggagtctgtcaagaatgctcaagatagccgggcgcggtggcccacgcctgtaatcccagcactttgggaggcccaggtgggtggatcacaagatcgggagttcaggagcagcctggccaatatgttgaaaccccatctctactaaaaatacaaaaaaaaaaaaaacagccgggagtggtggcggatgtctgtagtcccagctactcaggaggttgaggcaggagaattgcttgaacccaaaaggtgaatcacccaaaaggtgaaccaaaaggttgaggcaggagaattgctccaccaaaaggtggaggttgcagtgagccgagattgtgccactgcactccaccctgggcaatagagggagactccgtctcaaaaaaaaagaatgctcaagatatgtcatataatacaacatgcctgttcaaagggggaaaaatcttaggaaataacttacatgtacttcttggtttcatcatacaagacaagcacaaaagcaccacccatgcctctgagaacactggaccatgcacccttgaaaacagctttgcttccttcatcatgagtaatcttcctccagcagtcaaatgtgcctgtgtacatgatgtcagttcctttgcatcctgactgcatcatcatgtagcagcaaatggtgttaaatgaataggaagtcaacccagcaacggcagtgacagtctgtgcatcatccaactgatgacaatgtgagtgttcttgggatccggaagcattccctttgcagtgtcatagttaccgaagtaggcagcaggcagctcggtagataataccctgcacagacacgttaaagccttggtacaggctcttaatcccgtcagatttgtagatcttaactaggcagtcaccgaaacctcgcaattccctttcagctccagctttgcccacatcagctgctacacgagtatgggcaaaatcaagagggtacacaaaacacaaggatgtggccccagtggcaccgcctgatgccagattccctgcaaagtagcgccaaaactgggatctcttgtccacaccatccaggaagatctgcttgtatttatctttgaaggtgaagttaagagcctgggtgggggaagtatctgatgacactggccaggttaccgcaccaggacaggactccgtgctccttgggaatacagaccatgcagtctctaatgcccttgtattgcttatctgcagtgatctgcttgctggcatgctgcacctgtagcagcagcttgacccgctcgatgggtgctaccgccatcttggagatggctgcggccactccacctgccagggagtccttggcgaaggacacagcagcctctgtgatgtcgaaagaggaggcaggctgctgtgggatgggactggtccgagaatcggctttgactccggggctgattgtgaagtcatttctaatttggtgtttgggtgtcttctcactcgggctatgggtgtctctctacttcactgcttgtgtgttggagaaagggaaggaagcatgttttaaaaaacaaaacacagaaacactgatttttgtggtcctttgaattacctttatgggatccattttgtgctcctgaatacttaatagcatttatcgaacactatttcaagtactgttcttagttctaagagctttatactgtagttaaaaccactttaccagccaggcgtggtggctcacgcctgtaatcccagcactttgggaggccaaggccagtggattacatgagatcaggagttcaagaccagcctggccaacatggtgaaacccctgtccctactaaaaatacaaaaattagccaggcatggtggtgcacgtctgtaatcccagcgactcaggaggctgaggcacgagaattgcttgagcctgggaggcagaggggaggttgtagtgagctgagatcatgacactacactccagcctgggtaacagggtgaggctctgtctcaaaacaaaacaaagtaaaaaaactcagtctatctacagtgaagatcagtactgttttccctcatttcacaggtgggaaaacaaaaagaagtcatttgcttaaagcgcatgtgggagagcttggatttggatttgaacttaggtactgtgcataaactcctgtactccagctgtccctctagaaagaaaaggactctttctctgttttcttctcaccaaagaagatcctattagtaccctagcttcctggatagaaactactttaaagaaccagagatagtggtgcacatctgtagtcccacctattcgagaggctaaggtgggaggatcacttgaggccaggagttcaagaccacgctgagcaaaatagtgggacctcatctcacagaataaaatttaagaaaagaaaaaaaagaaactatagccaggcatggtggcacatgcctgtaatcccagctgcttgggagactgaggcaggagaatcgcttgaacccaaggaggcagaggttacagtgaacagagatcacgccattgcactccagcctgggcaacaagagtgaaactccatctcaaaaaaaaaaaaaaagtgccagcttatgaggtaattacattggttctctccagaggggtaacctgccaagaagagatgctatagatgttactcttatactgtaaaacattgtgaaatcagattgcttaaaaatgatgtattacaaagttatggaaaaaagcagttgtgactatggaagcccaaggcttatatcctagctctgtcttacactaaatgtgggtacagtgtttccactttttgtaaaatgggagctaatatcctccaacctgtgtgcctgacatggtgattaaaaggattaatcgaaacaacagtttgtaatttattctgtcagagcaaactgctgataaataaaagggagtaagttgactaaaaataaattttttttaaaaaaagaaaaatccgaataaagcaagtttgtactttgtatacaaataaaagatgttattaaaaaaaagaaactaaaaaaacttgagcaggagaagattgattctatgaggagtcttcaaaaagatcatggaaaatatgggttgcgaaaaaactatgcatggattccagattatttttccaccaaaattaactcatactaacttgttataacatgactgaacaggatttagtttgaggcactaagaaagataagatatcaatttgaaaaagggctcctatcagagcaacataaatactgcttaaattgaaggaagaacaaacatcaaatttatggtaaaccttgggtggaagaatggtgaaaccattgatgctttaggaaaagtttatggggaaatggcccaaataaatcagcagtttacaaatggataataagaagggacaagaggccagtcgcgatggctcacgcctgcagtcccagtactttgggaggccgaggcaggtgggtcacttgaggtcaggagtttgagaccagctggccaacgtggtgaaaccctgtctctactaagaatatgtaaaatttgccaggcgtggtggcacatgcctgtaatcccagctatttgggaggctaaggcaggagaattgtgggaacccaggaggtggaggttgcagtgagctgagatcacgtgactgcactccagcctgggcatcacagcaagactccatatcaaaataagtaaataaataaaatttaaaaagaaggaacaagggctgggtgcagtggctgatgcctgtaatcccagaactttgggaggctgaggtcggtggatcacttgagtccaggagtttaagaccagcctgggcaacatagtaaaaccctatctctactaaaaatacaaaaaatagttggatgtggtggcatgtgcctgtagtcctagctatttgggaggctgaggtgggagaatcacttgaacctgggaggtggaggttacagtgagctgagattgtgccactgcactccagcctccagcctgggtgacagagtgagaccctgtctcaaaaaagagaagggacaagatgatgttaaagacgaagcctgggcagggcacagtggctcacggttgtaatcccagcactttgggaggccaaagtgggtgtattgcttgaggtcaggagttccagaccagcttggccaacatgaggaaaccccatctctactaaaaatacaaaaaattagctgggtgtggtggtgatacctgtaatcccaactactcgggaggccgaagcaggagaatcgcttgaacctgagaggctgaggttgcaatgagccaagatcacaccattgcattccagcctggtcaacaagagcaaaactctgtctcaaaaaataaataggctgggcatggtggctcatgcctgtcatcccagcactttgggaggccaaggtgggcagatcacaaagtcaggagttcgagaccagcctgaccaacatgatgaaaccccgtctctactaaaaataaaaaaattagccaggcgtggtggtgcgtgcctgtaatcccggctactcaggaggctgaggcaggagaatcacttgaacccaggaggcggaggttgcaatgagccaagatcatgccactgcatttcagcctgggtgacagagtgtaagactctgtctgaaataaataaataggccgggcatggtggctcacgcctgtaatcccagcactttgggaggctgaggcaggtggatcacctgaggtcaggagtttgagaccagcctggccaaaatgatgaaaccccatctctactaaaaatacaaaaattagttgggggtggtggtgggttcctgtaatcccagctacttgggaggctgaggcaggagaattgcttgaactcaggaggtggaggttgcagtgagtggagatctcgctactgcattccagcctgggtgacactcctgagtgagactctgtctcaaaaataaataaataaatagatgaagcctgtggtggcagaccatccacattaatttgtgaggaaaaaattcatcttgttcatgccctaattgaagagaattcatgattgacagcagaaacaataaccaatacagtacacatatcatttggttcagtttacagaattaaagttgagcaaactttccattcaatgggagccaaaagtgtagtgcccagatcagctgcaggcaagagcagaacttgcagtggaaaatttaaatatgtgggatcaagatcctgaagcatttcttcaaagaattgtaacaggaaatgaaacatggctttaccagtatgatcctgaagataaagcacaatcaaaacggtggctacaaagatgtggaagtggtccactcaaagcaaaagtgaacagacaggtcaagagcaaatgtcatggcaacagttttttgagatgctcaaggcattttctttattgactttctggaaggtcaaagaatggtaacatctgctttgttttaagaaaattaggcaaagctttagcagaaaaacacccaagaaagctttactagagagttcttctccaccatgacaatgctcctgttcatcgttctcatcaaacaaaggcaattttgcaagggttttgatgggaaatcattaggcattcatggatcattaggctccttctaatttattttgtttcccaatcttttttttttttttttcgagacggagtctcgctctgtcacccaggctggagtgcagtggcacgatctccgctcactgcaagctctgcctcccgggttcacgccattctcctgcctcagcctcccaagtagctgggactgcaggcacccgccaccacactcggctaattttttgtatttttagtagagactaaacccactgatggggtttcactgtgttagccaggatggtctcgatcgcctgacctcgtgatccgcccacctcagcctcccaaagtgctggcattacaggcgtgagccaccgctcccagccggctttgtttcctaatcttaaaaatcctgattgggcacccatttttcttctgttaaaaatgtaaaaaagactgccttggcatgattacatttccaggaccctcagttctttagggatggactaaatggcttgtgtcatagcttactaaagtgtcttgaacttgttggaacttatgttgagaaataaggtttatgtttttatcttttaattccatgaactgttcggagttcccattatattttgactcctcttgcctattcacaatacacagttgagaaattgatcacagcttgctgtgttttgtagagattttttctgaccccagctgagaagtcatgaacatatgggacagactctactgtaaaatgggaatcattgagttgttttattttatgcattgttaaaacgtgtgctggaaacctgtcattatagaaaaatcagaagaaaaaatctgttatcccaaatttttaccagtaatgtttgcattttggtatatgtccttctgtacttttccacatggaaataaacagtttttttctccaactgctttataacttattttcctcatttgccagtatattgggaatgttttctagtgtatctacatcattattttcaatggctggtattccagtgtgcataaatctttactcaacccctaatctggaatagtctgggtttttgttttgttttttgtttgtttgtggtttttttggtcattactataaacattcctgcaatgaacatttttgaaaacataattttgcctacctgtcaaaatgtttctttgggataggggaattgtgaggtcagaggattagacttttaaaaagagattaaaaatatttattgaaaatataaaaatcattgttcaaaatattaaagtatacatgactttacattaaaatacacttattgcagaattgccctacagaattatatcaatttacattcctctcagtactctgagtgcccacttcaccatacttttcccaacaattctgttcccattaaacaattccctctatccctctccccatgacacctagtaacaaccattctactttctgtttctatgaatttgactacttcagatacctcatgtaagtgtaatgacaatatttgtctttttgtggctggtttatttaacttagcgtaacatcctcaaggttcgtccatgttacagcatgtgacaggatttccttcttttaaggttgaaaaatattccattgtatgtatgtgccacattttgtttatccattcatgcactgatggacatttaggttgcttccacctcctggttattgtgaatagtgctgctatcaacataagtattcaaatatctatttgagacactgctggcaattcttttggatgtatacccagaagcaggattgctagcttgtacggtagttctatttttaattttttttgaggagcctccggactgttttccatagcagctactcattttacatttctagcaacagtgcacaagagttccggtttctccacatcctcaccaacacttgtttttcttctcttctcttctcctcttcctttcctttcctttcctttcctttcctttgctttcctttcctttcctttcctttcctttcctttcctttcctttcctttctccctcccttccctctccctccccctccccctctcctcccctcccttccctttttttgacagagtctcactctgtcactcaggctgtagtgtagcagcaggatcttggctcattgcagccttagcttccggggttcaagtgattcacatgccctcagcctcctgagtagccaggattacaagcatatgccactacacccagttttttgtatttttagtagagacggggtttcgctgtgttggccaggctggtctcaaactcttagcatcaagtgatccactcaccttggcctcccaaagtgctgggattacaggcatgagccaccatgcctggacctgttggttttttaaatattaaccatcctaatgggtataaagtgatgtctcattgtggttttgatttgtatttctctgatgattagtaatgacaatctttttatatgctcattggccatttgtgtattattgctcttgttgcccaggctggagtgcaatggtgcgatctcagctcactgcaacctctgcctcccaggttcaagtgattctcctgcctcagcctcctgagtagctgggattacaggtgcccaccaccacacctggctaattttttttattattttttttctaagatggagtctcgctctgttgcccaggctggagtgcagtggcacgatcttggctgactgcaagctccgcctcccaggttcacaccattctcctgcctcagcctcctgagtagctgggactacaggtgtccaccaccacgcccggctaattttttctattttttagtagagacggggtttcaccgtgttagccaggatggtctcgatctcctgatcttgtgatccacccgcctcagcctcccaaagtgctgggattacaggcgtgagccactgggcctggccaatttttttgtatttttagtagagacagggtttcaccatgttgggctggctggtcttgaactactgacctcagttgatccacccaccttggccttgtgctgggattacagggagctctttacatactctagatattaagcccttatcataaatacaatttgaaatattttctcccattccataggttgctgtttcattctggtgattgtgtcctttgatacacaatttttaagtttgatatagtccaatttatttatttgttcttttgttgccggtgcttttgtttttttatccaagaagtcattgacaagtccaatgtcacgaagattttcagtatgtttttttctaggagttttatagttttgggtcttatgtttaagtctttaatccattttgagttaatttttgcatactatgtaagataaaggtatgacttcattcttttgcatgtggatatccagttttctaaaaggacatcatttgttaaatagattgtcttttcctcactgagtcatcttagtacctttgttgaagattatttgatcaattctcacatatatgtgaagatttgtttctattctagtccattggtttgtttatctttaatgccagtatcatgctgttttggttactgtagctttgtaatatactttgaaatcaggaagtgtgaatcctctttgttcttctttttaaaaattatttggctttttggggtcccttgagattctatatgaattttatgatgtcgctttctgtttgtgcaaaaagtgttgttgagatttggtagggattgtgttgaatctctgaatcacttgagtagcctggacgtcttagccttattaagttttcaaatccatgaacatgggatatctttccatttatttatgtcttcaatatttttcactaatgttttatagttttcagtgtacaaacctttcacctccttggtgaggtttattcctaagtattttattctttttgatgctattgtaaatggaattatttccttaatctcctttttggatcattcataattagtgtatagaaatgcaactatatttgtgggttgattttatatgctgctactttactgaattcacttattttgacagctttttggtggactctttaagtttatttacatataagatcacgccatctgtgaacggagttaattttacttcttccttccaaatttgaataccatttatttatttattttattttttgcctaattgctctggctaggacttccaatactatgtcgaatagaagtggtgaaagcaggcatccttgccttgtttctaatcttagaggggaagctttcagtcttttgccattcagtatgctgttagctgcaggcttttcatatatggcttttattatgttgaggtagcttccttctacttttagtttgttgagtgtttttatcatgaaaatatattgaaccttttcttttcttttttttctttttttttgagacggagtctcgctctgttgcccaggctggagtgcagtggcgcaatctcggctcactgccagctctgcctccaaggttcacgccattctcctgcctcagcctcctgagtagctgggactacaggcgcccaccaccacacccggctaattttttgtatttttagtagagatggggtttcaccgtgttagccaggatgatctcgatctcctgacctcgtgatccgcccgccttggcctcccaaagagctgggattacaggcgtgagccaccacgcctggccaaaaatatactgaatcttttcatatgctttttctgcatcgattgtgatgatcgcatggttttttcccttcattttgttcatatggtgtgttacattgattcattttcctatgctgaaccatccttgcattctaggagtaaaccccatttggtcatagtgtatagtccttttaatgtgctgctgaatttggtttgctagtattttgttgaggattttttacatcaatattcatcagagatactgacctgcaattttattttattgtagtttctttgtctggcttcggtatcagggtaatgctggcctcataaagtaagcctagaagtgtttcttcctctttaattttggggaagagtttcagaaagattagttaattctttaaacgttttgtataatagaatttgttgagaggtttttttttctctttttgagacaggttctcactctgtcaccctgtctggagtgcagtgatgtgacatgatcacagcttactgctgcctcaatctccgaggctcaagtgatcctcccacctcagcctcccgagtagctgggactacagatgtgtgccaccacacccaactttttttttatatattttgtagagatgaggttttcaagttgcctaggctggtcggaaactcctggcctcgagcaatcctcctgtctcagcctcccaaagtgctgggattaaaggcatgagccaccacacctagctgagaggtttttggttactgattcaatttccttactagttaattggtctgtttatattttatgtttgttcatgattcagtgtggtaggttgtgtttttctagggatttatccatttcttctaggttatccaacttgacatacaattgtccttggttttctctttaatccttgtaactccttggcatcagttttttttttggttgttgttgttgttgtttttcttgttgttgttgttttggagacagagtcttactctgtcgcccaggctggagtgcagtcgtgcaatattggctcgctgcaacctttgcctcctgggttaaagtgattctcctgcctcagcctcccttgtagctgggattacaggtgcccaccaccatgcctggctaatttttttgaatgtttatactagagatggggtttcgccatgttggccaggctggtctcaaactcctggcctcaagtaatccacctgccttggcctcccaaagtgctgggattacaggctgagccaccatgcctggctggcatcagttttaatatcctctttttcatttctgattttagttgagacttctctctttttcttaatctagctaagagtttgtcaagtttgttgaacttaaattttttttcttatttttttctattctcgcttttatttatctctgttctaatctttattattttcttctttctgctagctttgggcttcatttgtttttctttagttccttgaggcataaagttaggttgtcgatttgagatctttcttctttattaaagtacacatctgcagctataaacatcttagcactgcatttacagcaacccataagctttggtatgttgtgttttcatgttcatttttctctaggtactttctaatttccctctgatttcttctttgactcatttatttaatagtgtattgtttaatttccacatatttgtggcagttttccttgtgctgttgatttctagtttctttccattgtaatcagaaaacatattataaaatatagcgtttcttgtatttcaaatctactagtaaagagctttcattttttgtttatttggtaatgtcttaatttctctttaatttttgaaggatagttttgccactcatagaattcttggttaagagttttttgtttttagggctgggcacggtggctctcgcctgtaatcacagcactttgggaggccgaggcaggtggatcacgaggtcagaagatggagaccattctggctaacatggtgaaaccccatctctactaaaaatgcaaaaaattagttgggcgtggtggcacgcacctgtagtcccagctactcaggaggctgaggcaggagaatcacttgaactcaggaggtggaggttgcagtgagccaagatcatgccactgcactccagtttgggcaatggagcatgactctgtctcaaaaaaaaaaaacaacggagtgtttttttacttttagcagtttgaatatgtcatcacatttccttttggcctccatgatttcaataagaaatcgctgctggccgggcgtggtggcttatgcctgtaatcccagcactttgggagcccgaggtgagcagatcacctgaggccgggagttcgagaccagcctgaccaacatggagaaaccccatctctactaaaaatacaaaattagctgggtgtggtggtgcatgcctgtaatcccagctatataatccaagctactcgggaggctgaggcaggagaatcacttgaacctgggaggtggaggttgtggtgagccaagattgtgccattgcactctagcctgggcaacaaaagtgaaactccatctcaaaaaaaaaaaaaagaaaaagaaaaagaaaaagaaatcagctgctagtctgaggattccttgtgcgtgatgagtcacttatcttgttaatttcaagattccttgtatttggctttcaataatttgattataatgcatgtcagtgtggaactgagtttattctacttggagtttgttgcacttggatgtgtagattcatgtatttcattaaatttgggaaggttttggccattatttatttattttgagatagggtctctatcacgtaggctggagtgcagtggcacgatcacagctcactgcagcctcgacatcccaggctcaagtgattctcttgcctcagcctcctgagtagctggggctactgatgcatgccaccacacctgactaaatttttaattttttttttttttgagagagagtctcactctgttgcccagactggagtgcattggtgcgatctcagttcactgtaacctctgcctcctgggttcacgcaattctccggcctcagcctccggagtagctgggattataggcatgcaccacccacgcctggctattttttgtatttttagtagagatggggtctcaccatgttggtcaggctgggctcgaattcctgacttcaggtgatccatctgcctctgcctttcaaagtactgggattacaggcatgagccaccgcaccccaccggcaaatttttaaatttttagtagaggtgaggtttcactatgttgcccaagctggtttcaaactcctgagctcaagcagtcctcccgcctcagcctcccaaactgctgggattacaggcatgagccactgtttccggctcagatattcttttttcttattttgagacagggtctccctctgtcacccaggctggagtgcagtggtacagtcgtggctcactacagccttgacctcccaggctgaagcaatcctcccacctcagtgtcttggataggtgggactgtaggtgcactccaccatgcttggctaattttttgtattctttgtagagatagggtttcaccatgttgcccttgctggtgttgaacacctgtgctcacgcattctgcccactgtggcctcccaaagtgctaggattacaggcatgagccaccgcgcctggccccaaatgttctttattcccctttctctctctcctctccttcttgaattcccattctagatatattggtatgtttgatggtgtcccacagatttcttagacttcgttcattttttcttcgttttttcccatttgtgttactcaggtagtaaccgttattcccattgacctacttcaagttcaataattctctcttctgcctgccaaaattggctgttgagccccagtgattaaattgttcatttcagttgtagtcttcaactctagaatttctgtttggttccttttaataatttctgcctctttattgatattctctacttcctgagactttgtttgtattctttcttttagttatttggacatcatttcctttaactctttgagtatatttacaatagtttatttaaagtgttgtctgataaatccaatgtatgggcttcctcagggacagtttttattaatttattttgttcctgtgtattcccatactttcttgttcctttgcatgcctagtgatttttgttgttgttgaaaactggacattttgaatattttaatgtagtaactctggaaagtagaatctccctcttcttcagggtatatttttgttgcttgttatttgtttgtacagtgacttttctgtactaattttgtaaagtctgtattctttgttatttgtggccactggaatctcagttctgttacctcagtggccagctagtgatttgacagaaattttcttctatgtctggaacaacaacaacaaaatctcccagcccttgcagatgggctttgtgtgtgttggagcatgagcgtgcctttcttactcagccaggcagtttacaactctgccttcaccttcacttctttttgcatcatttccttttttttttgagacagagtcttgctctgttgcccaggctggagtgcaatggcatgatcttggctcactgcaacctctgcctcccgggttcaagcaattctcctgcctcagcctcctgagtagctgggattataggcgcccaccactacgcccagctaatttttgtatttttaataaagatgggattttgccatgttggccaggctggtcttgaactcctgacctcaggtgatctgcctgcctcagccttccgaagtgctagattacaggcgtgagccaccgcaccgaggcctttttgcatcacttctaattgtcaatcagaggtgaaagcttagtgcctcttcagtgtgtgtgtgtgtttcattttttgtttgtttttagtatgaatctagccctggacatgtatgtgtatggctttcttgtttctcaggaatatgtgtgagcttttcgaagcctttattcctcaaagcatctcattgctcatcctttcctttagcttttcaatttgtctgtttttttgccccagttgtcatccctttcgctaggtagcagcaactaatacattggcttggaaattttttttttcttgagatgaaatttcgctcttgttccccaggctggagtgcaatgggaagatcttggctcactgcaaactctgcctcccgggttcaagcaattctcctgcctcagcctcccgagtagctgggattacagacacatgccaccaggcccagctaattttgcatttttagtagagacggggtttctccatgttggtcatgctggtcttgaactcccgacctctggtaatcctcccgcctcagcctcccaaagtgctgagattacaggtatgaaccaccggacccggccggaaatgtttttgacaaatgcctcccggtagcctcatcagtcccgggaaaattacaaattaaatacatgccctttgagccggtccttcaaggagccaccagacaagtcaaactacaatttttaaaaataagtgtgttctgctccctccagtacttcgtatctatcatgggaatatagattgttgtcttcaaagctgctgccaagctagtagtgggggatgataccagggtaggttaaaatgtcataaagcttacttactgagatttggctttttaaaaaaattacttaagcattcccctagttaccataagcttttgattagattctagagttctgaaaaagttgattctgacaggttttcttttgctttatttattgcttttatggctagactgacatttaaagattcccattccacagttttttgctaatgtcctgtattttcatagtcttttaaaaatcctccccttttaatctgcacattaccaccctagttccagtttttaccttgcatcaggactattttaggaattcttaaactgatccctctgatacactaccttcttgattatgtgactttcctgttgagaaatctgaagctcacagtttctccttgcctatcaaatgatgtctttaagctgtagttccagcatagctttccaactttgtttcactgtttctcctaacctcacttccacactgtgttttgatgaagccataccactaggcttctcccaagtatgcagtttgctttccatatctgctcctgcacctccatgaatgctgtttgcttcccatctggattgtcctctaccttcacctctacctactgaatgctacccatctctctctctctcttttttttgaaacagggtcatactctgttgcccagggtggagtgcagtggatcactgcaatctgtgccccatggctcaagcaatcttcccacctcagccttccgagtagctgagattacaggcatgtaccaccatgcctggatactttttgtattttagtagagatggggtttcaccatgttggtcaagctggtctctaactccccaaatgatccgccagcctcggcctcccaaagtgctgggattacaggcgtgagccactgtgcccagccagaatactacccatctcttaatcagctcaaattgcagtctttctattaggtcattcctaattacttcaactaaaacgaatctcttctttcactaaattgctatgacagtttgttactaataaatgtatgacatacatttatattatgtatgtcatatattgtttgcattatgatctgtattcatgctttcattcattcttttaataactatttagagcacccactgtttgctagggctagagtagcaaagaaggcagacattgtacctaatgatcattatacattggttacatatatcattaagaaagaaaaggctgggggactgggtatggtggcgcattcctgtagtcctagcacattgggaggctaaagcaggcagatctcttgagcccaggagtttgagaccatcctgggcaacatggtgaaacctcatctctactaaaaatacaaaaaaattggccgggtgcagtggctcacgcctgtaatcccagcactttgggaggtcgaggcgggcggatcacctgaggtcaggagttccagaccagcctggccaacatggtgaaaccccgtctctaccaaaaaatacaaaaattagcctggcatggtggcaggcgacttaatcccagctatttgggaggcagaggcaggagaatcgtttgaacccgggaggcggaggttgcagtgagccgagatcgagccattgcactcaaacctgggggacaagagcaagacttctctcaaaaaaaaaaaaaaaaaattagccaggcgtggtggtgcttgcctacggtcccagctactcaggaggctgaatgggaggatcacctgagcccaggaggtggaggttggtgagcagagattatgccactgcactccagcctgggcaacagagtgagaccctgtctcaaaaaaaaaaaaaaaaaagacagaagaaagagagagagagaaaagaaaggaagggaagggaagaaggaaatggaaggaaagaagggaagggaagaagggaaggaaagtcaaaaggaaaggaaagaaagaagtgagggaaggagggagggagaaagagaaagaagaaataagaaaaagagaaagaaagaaaagaaagaaagataaagtaagaaaaaaaagaacccagcaggatttgatgagtgacagtaaggtgagtccaagttttccaggttaacagtaaggagagagcacgacaggctgagggaacatgtcagagggggctggggcagtctgctgccttactttctttaccagcgtcaaagaaccatttctattagcacagtgctttacacttaccgcacaagaagtataagaattaatgaacacacattgagaataggagtaggtttgacaagaaaaagaatccaatgatgaagagggagaagaataagagtaaattgtcagagaataagatcatttgaattcctttttatttcaataaaatagtagtagtagtaatagtagcagtagcagcagctaatgtttattgagtgcttactctggaaaaaaaaaaaaaaaaactacattaagggccgggcacggtggcatgcctgtaatcccagcactttgggaggctgaggcgggcggatcacaaggtcaggagatcgagaccatcctggctaacagtgaaacccccatctctacaaaaatacaaaaaaattaggcaggcatggtggcgggcgcctgtagtcccagctatttgggaggctgaggcaggagaatggtgtgaacccgggaggcggagcttgcagtgaggtgaaatcgtgccactgcactcccgcctgggcaacagagtaagactctgtctcaaaaaaaaaaaaaaattgcgttaagaactttatgtgtgtcattttacatacattctttattgtgtgccgtctgttcctcattttctacagtctcttgaagcggtctccgaatgtggagctctccttcccacagcgatcagaaggctcaaatgtctttagtggtagaaagacaggaacattgtttctcacttcataccgggtaatttctacttctactttaatctgctgattaactctacatttgttttccttgaaatgaagaaaacttaaacattgacttttgaagtgtttttaaacgtgcgctttgggattttccacactgaagggtggtggaagaaaagatgatgtttctcagttagaccagaatgcaccttgctcttgtaagtctcaatccatggacaaattctgcattccttttccaaagtttctgtccttgcgtaggtgattttcataacttcatgctccatcagtgatcccatgttgtcttttatgatgccatttgatctgatgacgaacctcactgttgaacaaccagtatttgctgcaaacttcattaagggaactattcaggcagctccatatggtaagtgttccctcagaagtgtgtatttttttttccctcaaaatcttctaaaaggtttaagattcaaacttggctcatgttgaaattcaaacaaaagctgccctactttgtcaggtagtgcttcccttggtgtttgtggcagtctttctgttgtcagctatgccagtttcttggtgagtgtgtgccatttcttcccccaggtggctgggaaggacaagctacttttaaattagtcttcagaaatggagatgccattgaatttgcccagttgatggtgaaagctgcctctgctggtaagtgatgctgataaagatattaagcactttggggttttttgtttgtttgtttgggttttttgttgttgttgttgctgttgttgttgttttgttgtttttgagacagggatttttgtatttttgtaagtcggggtttcaccatgttgcccaggctggtctcgaactcctgaactcaaatgatcctcttgcctcagcctcccgaagtgctggggttacaggtatgagccaccatgcccagcccactttggggttttaaggcttgtggaattaaagcaggacttctactcagccaagatttgctggcctttgtggccaggcagttggtattcgcacacatattcagcaggcatttcctgggcctacctacaattgtcaagtaccatgttacagggtaggaacacaaagattattcagtcccttcctatcctgaaggagcttgcaatctagtgggagcttacagccagacacccaggtgactaattatacctgatagtcttttgtccatttaaacactgacctcagatatctactgagcgtctcttccttgggtcagggagcccttagttattctttctttggtgtggctttttagtttttcttctctctggacttgcctttgcttttctcaggtttagtccccatcttacatgagaggggagtagaggtactgtcaagacttatagcactgatctaatggatgtaccacagaactctttcaaactgtgactacaaataatttttttatctcatatatgtgtgtgtgtgtgtgtatatatatatatatatatatatatatatatatatatatatttttttttttttttttttttttttttttgagacagtgtcttgctttgtcacccaggctggagtgcaatcatgcaatcttggctcactgcaacctccacctcccgggttcaagtgattctcctccctcagcctcccaagtagctgggattacaagtgtccaccaccaagcccagctaatttttgtatttttagtagagacggggtttcaccatgttggtcaggctggtctcgaactcctgacctcaggagatccacctgcctcagcctcccaaagtgctgggatcacaggcgtgagccagcacgcctggccggtccttgcgatctttaacccatggcttccatggcctctttgtacagccagcagagaaggaaataaagatctcccctgggaaatttttatgggccaggcctggaaactgtctacattacatctggtcacatgccataggcaaaactcagtgtggtaggctgataatggatccccagatatatccccatcccaatcctcagaatctgtgactgttacgttatttgtaaaaagggtgtttgtagacgtaattaatttaaggatcttgagatgacaagattaccctagattatttaggtggcctctaaatgccatcacaagtgttcttataagagagatgcagaggggagacaagacaaaagtgttttcttcggtaccacacttcctcacattggtctttaatggatatatcttaccaacttggtagaatcctcacttagaagttttttctgaatatctgttatgattaggtgctatgctaggcctggaataagcacaggcaaatgagatacaatctctgcccttaagacacgtgccattcaggacaagggtcatatttcttttctttctttcttttttttttttttttttgagacaaggtcttactctgtcacccaggctggaggctccagtgcagtggcacagataaggctcactgcagcctcaaatttccaggctcaagcaatcctcctgcctcagcttcctgagtagctaggaccacaggcatgcaccaccatgcctggctaatttttaaaaaattttttgtagagatagggtcttgccatgttgcccaggctggtcttgaactcctggggtcaagcaatcctcccatcttggcctcctaaaatgttgggattacaggtgtgagccacttcacccagcccatgtttcttttttatcttgtgtctcaagagcattgttggaaacacatgtaaggtggtgattaaatactctgttaattgtttagttgatatctgctatatatctgacttaattaaaagagttcctattttgccaaatttgtctttccagctgcccgaggatttccacttagaaccttaaatgactggttcagctctatgggaatttatgtaattactggggaagggaatatgtgcactccacagatgccttgttcaggtaaggtatggcagagaggttcttcctggaaggtggaaaattatgccagaggctcaaagatctatcccttgcaggcttgctccctgcaggagcagcagcagagctttaggggcttggaaaatggtcacatctgtgactttgtttccagactgaaacccagtggcaaagtcagcaagtgactgggctttggtttcaggcttacttttaatgatatatacaaacctggaacatacttggcaatcctgttagtgggaagggtcacttcctgtttatagcctgagcagaaaatatatgctcttgcccacttccttgtttccatttcacatagcatagtcatcatacctgtgccacacccttcaaccttactgaggactcgagccctgggtcctttaacagtttgtgttgttaaagtccactgctactgaatggggtttctggaaagtaattctcaaacatggtccactgcctactggtgggccaccaagggtctcctaatgctgccaacacacacaaaaatatgggacttttcttgagttctccttggaacttgatatgcatgtccatgggcctttagttttgtatgtaacttaaaggctacttatttgtaaccttaataggtaccttggtttttaaaggttattacagtctaatattcagaatctaaagtaattgttgctagggtttaacattttttcagttggtgaaattcacataacatataattaacattttaatgtgtacaattcagtggtatttagtgtaaaatttagcagtatttgacgtattcacaatattatacatccaccagctgtctctagtttcaaaaagtggtgttttttttttttggagacagagtctcactttgtcacccaggctgtagtgcagtggcactatcatggccccctgcagcctcgaccccctgggctcaagcgatcctcttacctcagtaccccccaaccagagtaggctaggaccacaggcgcaatccaccatgcccggctaatttttatgtgtttttgtagagacagaaatctccctatgttgtccaggctggttctgaactcctggcctccagccatctgcccgccttgccctcccgaggtgctgggattataggcatgagccatctctggcagccttttttgtttttgtttttgtttttttgagagggagtcttgctctgtcgcccaggctggagtgcagtggcgcgatgcaagctccacctcccgggttcacgccattctcctgcctcagcctcctgagtagctgggactaccggcgcccgccaccacgcccggctaattttttttttgtatttttagtagagacgggatttcactgtgttagccaggatggtctcgatctcctgaccttgtgatccgcccgcctcagcctcccaaagtgctgggattacaggcttgagccaccacacccagcccctgccagcctttttttttaaaaaaattttgtagatacagggtctcactgtgttgcttaggctggtctcacactcctgggctcaagcaagtctattgccttggcttcccaaagtgctgggattacaggtgtaagccacagcatctggtctggtttcaaaactttttatcacctaatagccactaagaagttattccccattgtcccctctctgatcccctggtatcctctaatctgctttctgtctttattgattcacctattgtgaatatatcacataaaagaaatcatacaatatgtgaccttttgtgtttggcttatctcactcaagataacgtttttgaggttcctccaagttgtagcatgtagcaatacttcatttcttttcctggctgaataatactccattgtacatatataccacaatttgtgtattcattcctccattgatggacatttgtcttgtttccaccttttggctattacgaatactagctgctatgagcatttgtatataattttctacgtagacatatgttttcatttctcctggatatgcatcttggagtggaatttctgggtcatatgtaaattctctaactttttgaggaaccaccaactattttccagtgctgcactattttacattcctgtgtaaatgtaagtgttcctatttctacacatcctcagcaacacttatcttcctttttttaaaaaaaaaaatctatattaaagccattctagtgggtatgaagtggtatctcattgtggttttaatttgcatttccttaatgactaatgatgttgaacatcttttaatgtgctttttatataccttaattggagaactgtccaagtcttttgcctattttttttattatttaaatcggattgcttgtctttttgttgttgagttgtaagcattctttatatagtctggatatgaaatccttgtcagatatattatttgtaaatatttttaggttttctttcacattcttgataatgactttttttttttttttttgagacaaagtctccctctgtcacccaggctggagtgcagtggcgccatcttggctcactgcaatctctgcctcccgggtttaagtgattcttgtgcctcagcctcctgaatagctgggactgcgggtgtgtgccaccctgcacagctaatctttgtatttttagtagagatgtagtttcaccatgttgttcagactcatctagaactcctgagctcaaatgatctgcctgcctcggccagtgggttacaggtgtgaacaactgtgcccaggcaaaaatggcttttaatgcacaaaggtttttaatttttatcagatttctcttttttcctcttgttgctcatgcttttgatgtaaaatgtgagaattcgttgccaaatccaatgtcatgaagatttatccctgttttcttctaagcattttatagttttagctcttatatcaagcttgtccaacccatggcccaggatggctttgaatgcagcccaacacaaattcataaactttcttcaaatgttatgagatttttaaaaatagctcatcagctatcgttagtgttagtatattttatatgtggcccaagacaattcttcaccaatgtggcccagggaagccaaaagattggccacctctgttttatattaaggccattgattcactacaagttaatttttatctgtagagtgaagtgagggaagaacctcattcttttacgtgcagatatccagttgtcccagaatcattttttgaagagactgtttttttcccattgaatggtcttggcattctgtcaaaaatcaactgttcatagatgcttgggtttatttctggactcttaattcattccattggtctctaagtctgtccttgtgccagtaaaacactgtcttgattacagtagttttgtaataaattttggattaaagcaaaataactttacagctgtccattcactttatccagttaaatcactttggggaatgtaacccaaggtaataagtaaaactcatgtttattgtaaggttaattggaaagtcagaaacaacaaaaagagtcatctatccatatgatgaaatattatccagctttgaatttatgaagtaaattaacaatatgaagacatttcttataatattaagtaaaagagccagatttaaaaaatcatatggctggccgggcgcagtggctcacgcctgtaatcccagcactttgggaggccgaggcgggtggatcatgaggtcaggagatcgagaccatcctggctaacatggtgaaaccctgtctctactaaaaatacaaaaaaattagctgggcatggtggcgggtgcttgtagtcccagctactcgggaggctgaggtgggagaatggcatgaacccaggaggcagagcttgcagtgagccaagatcgcgccactgcactccagcctgggcaacagagcgagaccccctctcaaaataataataataataataataataataataataataataataatatggctgatatgatcatgattatataaagaatattcacagagattctacaaagaaatacaccaaaatagtaagtgttcaatggtagaattatagatggcttttttccattcctcttttctctattttccaaacgcatattcctcattaagcatgtattactttttttcataatcaaactttattaagtaaaacacatatctgtgcaagagtataagtaacgcaccgatctattgatagggttgttttcatgttgatttgaatccctgcacaacaggaagtgatatgccttcaattggtgatagctagaggaaatagctttagcattattctgcctgacttctcttcttgcgtcagtttgcttcagcattattttttaagttcttccttctcacatattccttgacttaaaggtaactgaatttttttccttccattataattcccagttattgtctatggagccccacctgcaggatatggagccccacctcccggatacggagccccacctgcaggatatggagcccaacccgtaggaaatgaaggcccgcctgtgggatacagagcctcacctgtgcgatatggagccccacctcttggatacggagccccacctgcaggatatggagccccacctctaggatatggagccccacctcttggatatggaaccccacctctcggatatggagccccacctctcggatatggagccccacctgcaggaaatgaaggcccgcctgcgggatacagagcctcacctgctggatcaggagccaggcctcaggaatctacagcagcccaggctcctgaaaacgaggcttctcttccctctgcctcctcttctcaggtccattcttaaccttctaagatgtaaaccttgaagactcaccaagcaaagaggtaccctaaaattgaagtcaggataaggaggacgactcaggtatgtgatcacaggcttctcgcaggtagttgttccaccctttggaagggcaatcttatgggggaaggtgaaactttacttctgtgcctagattttagaagcagaatcaactcttaaatagctggctaaaggaagaataccattgtggggctaattccccagtaatttggttgacattgggttgcatttttaaacataactttttccacactcgcattcaaggttcctgtcttcccatcctcattcaagaaacatttattatgctccgtttgctaggcactaagatgcgtgctaaaaacgtcatgttgaacacttagttgtttgagaaagctaaattttcaatagtaagagtgttataaattacggtggatccacaaaatggagtattatacacctgttgaaaactatgtctagaggtagagaaagccttctttgaggagaccaaaaccaacaaataaaagcatgataaattgactatatcaaaatttaaaacttctctatgacagaagttaaaagataggcaacagaataggaaaaagtgattttcaacatatatattaatttatagtcagaatacgtgaataactacaaatcaattctccccaaaatgacagaaatatgaattgccgaataaccaaggcaatagcatggccagaaaacgtttgaaaagatgttcagcttgactagtgttagggaaatgcaacctgagatgagaaaacatttttatctccaaagatttacaaatattaaaactcttgatatggcactttcacattttaaaatatgcctgcgagaaaacttgcatgtgtgcacaaagatgcatgtgggaagatttcattatattcattgtttctaacagcacaaaattagaaataacctatatgtccattaataggaaatatatgaataggctatggtatgcccatactacgtatgcagaaatttctaagacttgttgataaggagaaaagcaagttgtagggagcatatactatagtgattttcagcctcatcagactgaatgccccattttataacaaatatttatattttataacaaacgtttatatttgtatatttataacaaatattttgtaatgtctccttcacttcaatgaagtttgtagataattgcatatgattccacaccatttcaaccaaaattaataggccataaatgtgatagaggaaataaaaggagtttgtagtaaaattttaagtgttttaatatataaatgctcagattctaccacactagaagacatactgaagtaatcaagggttcactcccatatacatagtcagcataggtataaagattagaagtgctaactgatatgaatatgttgctttggtgacttgaataccattgctattggcaatattgttctccaaaatggtgaacaacctttgaaaattttccaaataaaacaaagtttagtcttcccttgatttacacagtggttgaattcctgaaaatttctgtatatattaaagtcatataaaacagagttaggctgtaggctcaaatgattataaacatgcttcacctacatcactggctggagagccatttgaaagtcaggagacataggacaattaaggtactgccctgtacgtttcaggatgtcttgcatcttcgactcctcacccattaagtgccaataatggcctccaattgggataaccaaaaatgctcccacttatttcctaattgctccctggggggcagtaccatccctgctgaggaccactattctagactgtttcaaggctttcagccccttcagagctcaccattctcccactctggcaaggcaggcaaagttcttaatttcattggcctttccttatcttattgtaggctcatcaagccacctaaaagggaggccttaaaaatacattagtagccaggtgtggtggcacatgcctgtaatcccagcactttgcactttgataggataaggtgggagaatcacttgaggccagttcaagaccagcttgggcaatatagcgagaccctgtgtctaggaaaaaaaaaaaaaaaaaaaaaaagccaggtgttgtggtgtgcacttgacccagaagacatttaaatcaatatattttctatgcatttttttttttgagacagagtcttgctttatcacccaggctggagtgcagtggcacaatcttggctcactgcaacctccacctcccaggttcaggcaattctcgtgcctcaacctcctgagtagctgggattacaggcaggtaaaaccatgcccagctaattttttttatttttatagagatggggtctggccatgttggccatgctggtcttgaactcctggcctcaagcaatcctcctgtctcagcctcctgaagtgctgggattacaggcatgagccactgcgcctggccttctatgcatatttcttatatgtagttgaaatcatgctatataatgtttcaccagatattttacattttcataggttttgaagaaatgcttgtaaatattgttagtgaccacataatattctgtgacacagttacaccataacgtattttctcagtccctcttttaaggtatttgaattgtttccaggtttttgttattacaacttcatgattaacttctttgtatatggagctttttaaaagttttaaatgctttccttaacacagcttagagtcattgattgatctgcattgtgaaaattaggaaaccagatgctcccatgttctcaaggacagcctttcttaaggaagtcaggtagatattaatgggttttatgtgaaatggagtaactgggttaaatataattgaaaaagacaagaaaactggtttctttactacttcttagagccttgactatactaatggacataatctccaagaaggagagattttcaaaatttacagttttttcaaaattatttgattttagaatattcagtaaacattttgttcagtggaagaaactgagaaacactttctggaattatgggatattagaattagaatggacttcaggtatctggagtatgctagaccttaaagctctttccaaaaatgaagacaagtcaaaagaccattcttccttccattccaaataaaagagctttatatccaatttacagaaagcagggtgggacatcttgaagataaaatatatagaaagtagctgctgcttcctctcagaaattactgggatagagttatgggtctaggaagctggaatgtcaaaacacagggacagccactttgcccaggcaactggcatgaagggaagaagtgaaaagggaaagtgtggctgtaaacctctctaaagtttccaaacagggaatccaggcaatattggatcttaaacatgggtcataggatctggcgcttttatccctaaaatttttggaggaaaataacgagatattttaagtttcttcttttcttacttccaaactacagtacgtgggcaacagtgatgagaggaagagaggagagactcaaccaactagagcagggataaggtttcccttgttcagcttttcagtgtctgctggaatgtgatggtaagttgagaacagggtgaatgggtgaggccttttttatatcagaaagttttccgagtaactgatctctggcaaatatttggggattagaattctaaaagaatacaaactagacttctcttctgctcttcatgttagttatacttgtaccaggtagatttgaggtggggtccagttacctgaaaagcgtagcaggttcgagtttcttaaaggtggaattccaccatgttctcctgtgcaaagggtacctgtttacctggtccaccaaactgccccagtacaaccaaaggctgtgactgtgtaaggatagaaccaagtggagccacagtttggacccacgtggtgctgcgtggcacacctactgttagttagctcccactgtctggtacagttgtttcccccaaaggctcagtccaatttgttctataagaagagctttgtgtcctgtatattcaaaggaccctggtttttgctttgctgaggacaaatccagtcagaattcagctgagccttctgcatgctgagagcactcatgtgctgagttcctcagctcctcactgacgttttgagtactttctttctgactcactcactgtgctggtggattccgctcttcctgtctcttccccagctgcaatacagaaactatactctgttgtctactctttcatttcctattagaaatataaagggatagaaataagaagaccttttagtcctggactatctggtattggcccctaaaatgagcctccaaatactccttttcatgggtaagtggatgctccccagcctgctggagcagaaccttcctggctcagctaccctgagatatcaggacaaaaacatatagttggtgtgattttcctctttttgtttttttttttttcaagatagaatctggctctgtcccccaggctggagtgcagtggcgcgatctcggctcactgcaacctttgccccacaggtttaagcgattctcctgcttcagcctcctgaatagcttggatgacaggtgcctgccaccatgctcggctaatttttgtgtttttagtggagacagggtttcaccatgttggccaggctggtttcgaactcctgacctcaagtgatccacccgcctcggcctcccaaagtgctgggattacaggcatcggcctgtgcctggccgatttttcaatccatagattaatatgttcaagaaatattgcatgtctttgttttctgtaaatttatttctgttaccaagatccccaccaccatctgctttgttggtgggcttctcacaaatcctaagattatgcaaaggtatccagattttatttggcaccaagatgctgagaagtttcttctggtcatcagactgcttctgaaacagccactatccagtcctggcagtcccgtcaagtctaaaagcttgttgccttgggaccccagaatcttaggtagggcttagaaccagggtgtcagagatccaactctgtgtaccatattgctccttagaactggggagtaggaccccaaaggcctccttatccttgagagtctgacaattccttaaacttccagattctgccctctcagctgtgctgttggtctgcatcacctctatctcttaagcatctatcctaatccaaatctcaggatttgggtttacccaaaaggtaatagaaagcctttgccttcatgttgacttggctttccttgcctagcacttggttgcttgcttgaaaatcatgtatgtatatatataaaatgtagaagcccaattcaaattaataatgtaaaaatttattctgttacacagattacctcattgtcaggtaggaagtgaaacgtatgatattcttcctggcctttgccttgagagtcttctggagcctgaagagggtggggcagacaaccatggactgctagagaataaactttctttgaagcttcctaaatggattagaaagaaggggttctgtcaaagggaaagggtctatacagatgtgaccagcagtttgattagtttagatgtatgatttagtagccaatataagaaacttgtaatttttagtaattagaatttattataaataataaaacagggtattaattattaatattatggtatctttggggtgtcacttttctggccagaaacctctgtggacaagtggcacctctgcccaagtattgcttgggcccactgggctcattccacccacccggcctgacaggctgcacttggctcatgctactggcctggatcccatgcctgccaagggagattgcatggagtgacaaggggtgtgtggggaagtgtggggtctggctatttttcagtcagatgtgccagctgctgcagtggggtggtcagctccaggtaccagcatgggcaccagctctccacgaggctgcagctggaccagtcgcactccaagcagcttccacagctggcaccagggaaaaggtggtgcccagaagcttggagatgccaggaaccatagggccccaaagagggagtcacagccctggcttggagagctcccaggtctgggcttcccaaagggctgcagctcttcttttcttctctttgcccacaacatgttgagcaaggggcatgtctcaaccctgtttgtgttacaggtcttttagcctcatttagtgggtccaaagttcttcaatgaggtgcacagacaagtagagggtgagcaatgagaatgaggtacacagacaagtggagggtgagcaagacaaacaggagctattgagtgacaatagctcagaggaggccttggagtgggtagctcctatctgcaggcaggtcttcctgtcatctctgtggctctcagcagagaggaggccctggagtgggtagctcttcactgcagctcattgtgctgatgtctgctgctctcaacagagaggggtcctggaatgggtagctcctctctgcagctggtcgtcccaacatctgcttagctctggctgagcccagggattttatgggcctcagaggggaagaagtacatatcgattggtccatatgtggccatgggcaggcccagaaaagccatcacaagttctcactccagtccatgggactggcatcctggcccccagctttcaagccctccctggcctgaaggtgtgacgtcaccagggacccatccccttctacccaggaacctgtctgcctccttccgttgatggtacccaggctgtaggtgccaagccaagctgccctcagctcccctcagtttccttctatgctcattgtgcccaaaatctggagggggccagggcggcagggggctggtgtgtcagcactgcccaactttgctctgagatcagagaaggcagggagaagctaggcagtaggaacaggcatttccatgcctgcaagggcaagggggtatcgggggacctgccccaataatcacgtaggttcttttctattttcctaagcgtcggctgacttgagaaataaaaggacagagtacaaaagagagaaattttaaagctgggcatccgggggagacatcacacgttggtaggatctgtgatgccccacaagccacaaaaaccagcaagtttttattagggattttcaaaaggggagggagtgtgcgaataggtgtgggtgacagacatcaagtacttaacagggtaatagaatatcacaaggcaagtggaggcagggtgagatcacattgctaatgaagtttcaggcaccattgtcattgataacatcttatcaggagacagggttttgagatcacccggtctgaccaaagtttattaggcgggaatttcctcttcctaataagcctgggagcgctatgggagactggagtttatttcacctctgcaatctcgaccataagagacaggtacgccccgggggggccagttcagagacctacccctaggtgcgcattctctttctcagggactttccatgctgagaaaggaattcagtgatatttctcccatttgcttttgaaagaagagaaatatggctctgttctgcccggctcaccggtggtcagagtttaaggttatctctcttattccctgaacaattgctgttatcctgttcttttttcagggtgcccacatttcatattgctcaaacacatatgctgtacaatttgtgtagttaacgcaattattacagggtcctgagacgatacacatccttctcagctgacaggattaagagattaaagcaaagacaggcataggaaatcacaaggatatttactggggaagtgataagtgtccattaaatctttacaatttatgtttagagactgcagtaaagacaggcataagaaattacaaaagtattaatttggggaactaataaatgtccataaaatcttcacaatccacattcttctgtcatgacttcagccggtccctccgtttggggtccctgacttcccgcaacaaggggggccttcctgggcccccaagagtgcaaggatgcctgggtctgcagccacggtttgggcagctggagctgtgcctgggagggtggagctcccacctgcccctctgggccctgagagcacagggatgcctgggtctgcagccacggcttgggcggctgcagcagcatccaggaagctctcaccccaacttggaaggggcgggtctcgcgcttgtccctggcttttgccttctccatggagcatgcagccctggccatgcctagttgctgcagccagcgtgatggcagcagctgctccagatggcctgctgctgccatcattaatatgtagctattaaacacagttggtgaatcacttttttgtctcttaaattattttgcaataatttaatatttatgacatacaaaaattatatatatttaatgtatacaactgaatgtttttgtgaaacattgtgaaatgaccatcacattccaactaattaacatatctattacctgtatatagttaccatttttataccctttgaccaacatcctccatttccccctcttcccagcccctggcaaccaccatcctactttctgtttctatagtttgactattttagattctacataaaagggagatcatgcagtatttctctttctgtgtcttgcctattttgtttaacataacttcctccagcttcattcattttgttacaaatggcaggattttcttttttaaaggctgaataatagtctgttttgtatgtgtgtataatcacattttctttatctgttcatcactgaaggacatttaggttgtttccatatcttgactgtcgtgcaaaatgctacagtgaacaatgggagtacagatatccctttactatcctataggattgtttgatcatatgttctatttttttttttctttgagaccaagtctcgctctgtcgcccaggttggagtgcagtggcgtgatctgggctcactgcaagctctgcctcctgggttcacaccattctcctgcctcagcctcccgagcagctgggaccacaggcatctgccaccatgcccggctaattttttttacttttagtagagatggggtttcagcatgttagccaggatggtcttgatctcttggccttgtgatctccccgcctcggcctcccaaagtgctgggattacgggcgtgagccaccgtgcccggccatgtgttctatttttaattttttgggaaccttcatactttttccataatggctgtatgaatgtatattcctaacagcagtgtacaagggttctcttttctccacatccttgacaacatttgttatcttttatctttttgataatagcctaaaaggtgtgaagtgatatctcattatggttttgatctgcatttacctgatgattacaaatgttgaacacattttcatatgcttattggccatctgaatttccttttttgagaagtgtctattttggttcttggcccattttttaatccagttatttgtatttttagcattgagttgtatgagttccttatatattttggatattaatcccttatcagctatatagtttccaaacattattttcccattctgtaggttgccttttcattttttggattatttcttctgctctgcagaagctttttagtttgatgtaatcccacttgtctattttttctttcattgcctgtgcttttggtgtcatattgagaaaattattacaagaccaatgtcaaggttttcccaatgttttcttcgaggaattttgcagtttcaagttttacatttgagccttttgtctatttgagttgattgttgtgtagtatgagatggggtcagatttcatttgtgtgtgtgtgtgtgtgtgtgtgtgtgtgtgtgtgtagatacccagtttttccagtactgtttattgaacagattatcctttcccgattgtgtgttcttagcacccttgtcaaagtaagttgttcattaatatgtgagtttatttctgggttctctgttctgttccattttgtctgtgtctgtttttatgccagcaccatactattttggtgatagctttgtaagatagataatttgtagtcaggaagtgtgatgtctccagctttttgttctcgttcaaaattgctttggctattcagggttttttgtagttccatatgaattttaggattttttttttctatttttataaaaagtgcaattgggattttgatagggattgcattgaatctgtagattgctttaggtagtatggacacttagacgatattaattcttccaatctgtgaacatgagatgtctttccacttatttgtgtttttattccatttatttgtgtcagttattttgctgagtcccgtaaattcctaagtattttaaaatttttgttgctaaagtaaatgaggttgcattcttaatttccctttcagatagttcatctttggtatatagagatgctatggagttttatatgttgattttgtgtcctgaaactacggaattcattcattagttctaccagtttcggggggaggtgcggggagagagagagagagtgagagtgtgtgtgtgtgtgtgtgtgtgtgtgtgtgtttgtagtcttttgagctttttatgtatatggtcatggcatgcaaaaataatcttactttttcctttctgacttggaagcctctgtttttcttgcctgattgccctggctatgacttccagtactatgttgattaacagtgataagagtgagcatcctttccttgttctgtatcttagaggaaagaaaagctttcagtctttcaccattgagtgtgatgttagttgtgggcatttcataagtgacctttattgcattgaggtaaatttcttccatacttgttttgttgagtctttatcatgaaaggatgttgacttttgtcaaatgctttttctaggtctactgatgtgatcatctgttttttgtgtttccttcctcttattgtgatttactacattggttgattttcatatgttaactgaccttgtatcctatggataaatcccactctatcatgttgtataatcattttaatgtgctgttgaatttggtttgctagtgttttattaacgatttttgcatttatgttcatcagggatattgcctggtaattttcttatgttatctttagctttggaatcagggtgatgctgactttataaaatgagtttgggagtgcattctcttttttaatttttggaagagtttaagaaggcctagtgttctttgaatatttggtagaattagcatatgaaaccatccggtcttgggcatttctttgttggattttttttttgtttgagaccaagtctcgctctgttgcccagattggagtgcagtggtgtgatcttggctcactgcaagctccgtctcccgggttcacgccattctcctgcctcagcctcccgagtagctgggactacaggcacctgccatcacgcccagctaattttttgtacttttagtagagacggggtttcaccgtgttagccaggatggtctcgatctcctgacctcaggtgatacacccacctcggcctcccaaagtgctgggattacaggcgtgagccactgcgtccagctggattttttttttctttttcgagatagggtcttactctgttgcctaggctgcagtgcagtggtatgatcattgctcactgcagcctcaatctcctgggctcaggtgatcctcctgcctcagcctctcttacgtagctgggactacaggtgcacaccaccattcctggctaatttttttttttttttgagacagagtctcaccccgttgcccagggtggagtgcagtggcactgtgtcggctcactgcaatttccgtctcctgggttcaagcaattctcttgcctccatctcccaagtagctgggattacaggcgcccaccaccatgcctggctaattcttgtatttttttttagtagagacagggtttcaccatgttggacaggctggtgtcgaactcctgacctcaggtgatccactcgccttggcctcccaaagtgctgggattacaggctttttttttttttttccagtatcagtgaggtcttcctgtgttgcctaggctggtctcaaactctagagcccaagcaatcctcctggctcagcgttccaaagtactgtgatcataggtgtgagccactacgctcagcctggaatgtttttgattactgattcaactccttgtttgttattggtctgctcagactttctgtttcttcttgattcggtcttggtagtgtgtgtgttactaaggatttatccatttcttctaggttattccatttattggcatataggttgtcataatagtcccttatgatcctttttatttctgtgtcatccattgtaatgtctcctctcttatttatgattttatttatttgaatcttcttttttaatctagctaaaggcttgatgattttgttgatctttttaaaaagccaacttagttttttctattctctattttgtttatttctgctctaatttttcttatttctgtccttctgctaactttgggtcgagtttgttcctctttttctagtttcttgatttgtacagttaggttttttttttttttttcctcgagatgaagtcttgttttgttacccagagctggagtgcagtggctcaacctcagctcactgcaacctccgcctcctgggttcaagcgattctcctgcctcagcctccagagtagctgggactacaggcaggcaccaccatacccggctaattttttgtatttttagtagacatggggtttcactatgttggacaggctggtttcgaactcttgacttcaagtgatccacccgccttggcctcccaccatgccttggccaatgttaggttctttaattgagatctatcttctctctctctctttttttttttttagacagagtcttgctctgttgcctaggctggagtgcaatggtgcgatctcagctcactgcaacctccgcctcctgggttcaagtaattctcctgcctcagcctcctgagtagctgggattatagttgcctgccaccacgcctggctaattttttgtattttagtagagacgaggtttcaccatgttcgccaggctagtcttgaactcctgacctcaagtgatctgcctgcctcggcctcccaaagtgctgggataacaggtgtgtgagccacctcgcctgaccgagatctttcttctttttaaacataggtgtttaatgctatacatttcccttatggaactgcttttgctgattcctgtaaattttagaaagttagaattttatttttgtctcaagatattttaaaattctctctggatttcctcttttatccagttgttcaagagtgtattgtttttatgaatttgtgaatttttctattttctttatgttaccgatttctagttctttccactgtggcctaagaagataccaggtattatttcaatcttcttaaatttgttaaaacttgttttgtgacttaagatgtgacctatcctggaatatgttccatgtatacttgagatgaaattgtattctgctgctgttggctaaaacgttctgtatgttaggtccatttggtgtatagtgttattcaaatcagttgtttttttattggttgtctgcctgaatgtgctatccattattaaaagtggaatattgaattctcctactattaaattgtttttaacctctttcttcatatctgtccatatttgatttatatatttaagtgctctgatgttcagtacatacatgtttataattgttatagcttcctgttgaattgaaacttttatcattatatgactttctttgtccctagtaacagttttggacttaaaagtctgttttggctgggcacagtggcacacgcctgtaatcccagcactttgggaggggaggctgagacaggcagatcacgaggtcaagagagcgagaccatcctggccaacatggtgaaaccccatctctactaaaaatatataaattagctgggcgtggtggcacacacctgtagtcccagctactcggggggctgaggcaggagaatcacttgaacccaggaggcggaggttacagtgagccgagatcatgccactgcactctagcctggcaacagggcgaggttctgtctttaaaaaaaaaaaaaaaaaaaaaaagtctgttttgtctgataaaagtatagccacttttgctctcttttggttaccatttgcatggagtatctttttctatcccttcacctttagtctgagtgtccttatagctaaagtaagcctttagcttacttctttttatattgtgactctattaccaaatttttttggttatagttattcttgatatttttatttttcaacttttgtagtgttatgggtaaattgggcaccaccattacagtgttatattattttgtatttgactatatttacctttgcctgtgagatttatgctttcacattgctgattaggatgttttaaattccatttgaagaaatcccttaagcatttcttgtaagacaggtgtaatggtgacaaactcagtttttgtttatgtgggaaagactatctctctttcagttttaaaggatagctttgcagggtatagtattcttggttgccattttatgtcaatatttggaacatattatcccattctttcctggcctacaaaatttttgtggagaaatctgctgatagtctcatagggattcccttgaatgacaagttgcttttttcttgcatctttcaaaagtttttgactttgacagtttcattgtgatgtgtcttgttgtagacttgtgttcaacctatttgggatcctatgggcttcttcagtctggacgtctatttctttccaaagatttgggaatctttttagttacttcttcaaatacactttctacttccttttctcactcttcttcatctcataaccccataatgtgtatattagttcacttgatagtgtctcataaatcctataagctttcttcgtacattttagttcttttttctcttttctcctccaattagataatttcaaataacctgtttttgagtctgcagattctttcttctacttgagtcatcttctgaagttctgtattgcattttgtagttcagtcattatattcttcagctccagaatgttttgttttaatttttctctatctttgctgaacttctcatttcattcttgtattcttttcctgatttcattaaattgtttatctgtgttctcttgtagtttgtggaatttctctaaaacaattattgtgaattttttatcaggcggttcatggatatccatctctttggattatttactagaagcttattttcttcctttggtgttgtcatgtttccctgattccttgtgatccttctagccttgcataggtgtttgcacatttagagaagtaatcattggctgggtatggtggcccatgcctgcaactccagcactttgggaggccaaggtgggcagatcacttgagcccagcagttcgagatgaccagcttgggcaacacggtgaaaccctgtctctaccaaagaagataaaaaaattagccaggcgtggtggtatacacctgtagtcccagctactcaggaggctaaggtaggaggatcccttgagcccaggagacagaggttgcagtgagccaagaaaaaaaaaaaaaaaaaaaaaaaggagaagaagcaatccatctcttctaggttttatagagtagctttggtaaggaaagactttcactcctcaggagtgggtgggcagcatgctgcagtgtgccatggcattggttctagtggtcctccacaaagtgtgggggcatgtggcagctccaggttcatggagcagtacagtgttttattggctcagggagctgggtctgtgatgtcagcaactgtgtggtccttggagacaagaggtgtgggggcctacagtggctgcaagggctgttgaagttctcagcaatgcttccaggtgcagcagcaagggactggaacaagttgttggtgtggggctagggctcgtggtgtgtatatgctcagttgtgggagccagctgctggcacatgtgtgatggcaatggccagatgtgggcatatattgtggtgaaggcgaggaccaacagtaggggctggagtcaactctaggcacacacacagtggcagttatgtgtgtgtgtagctgtggtgttggtagtgtgcatccttgtgaatttaagggccagttgtaggcatgtgcatggagggaagggccagcaaccattctggatcagctgcatgcatgtgcacaactgaggagaagcaaattgcttttaaagtccaaatgttctttcaacaatctttgacacgctagccaaaactactggagctagatttttttttttttgagatggagtcttgctctgttgcccaggctagagtgcagtggcgcgatctaagctcactgcaacctccacctcccaggttcaagcgattctcctgcctcagtctcccaaatagctgggattatagggaactgccatcatacccggctaattttttgtatttttgtatagacagggtttcatcatattggccaggctggtcttgaactactggcctcaagtgatccacccaccttggcctcccaaagttctgggattacaggcgtgagccacctcgcccgccctgcagctagagttttaagttgttaaccaaagaaaagatttccttctctgttgcctcagagaggcaatagttgtcttttcggtttggagaagagttacccaaatgagccttgctctcctgtttcaccaagtctgtgcctagaatgctttctatccatccctgtccctatcccaccaggcatgtgccactatgtctggctaatttttttttaaatttttttttatctctacagacaaggtctcattatgttgactaggctggtcttgaactcctggcctgaagcgatcctcccacttcagccacccaaaatgctgagattataagcatgtgccaccgcgaccagctggccttacctttcaatacagccccactggggattcagtttcaacatgagtttcagaggggacaaacattcaagccatagcaggaattaatagagaaaatcaacaaaaccaaatttcgttctttgaaaagatgaataaaaattttggttttggctaggtacagtggctcatgcctgtaatcccagcattttgggaagccaaggcagaaggattgcttaagcccaggagttcgagactagcctgggcaacgaggggagaccctgtctctacaaataataaaaaactttcactggacatggtggtgtgtgcctgttagtcccagctactggggaggctgaggcaggaagattgcttgaacccaggaagtcaaggctgcagtgggccatgttcatgccactgcattccagcatgggtgacagagactgtgtttcaaaaaataaatttttaaaaatttattttgtagagatggatgtcactctgtcacccaggctggagtgcagtggcttaatcatagctcactgtaactaggaactcctgggctcaagttgatcgtcctgcctcagcctcctgaatagctgggactacaggcacatgccacacctggctaatttttttttctttatttattttttatttttttaagagagatgggcatctcactatgttgcccggtctggtcttgaactcctggccttaatcaatcctcttgtctcagtctcccaaagcactgtgattagaagcataagccactatgcccagcctaaaatcaataaaattttaaaacctcggccgggcgcggtggctcacgcctgtaatcccagcactttgggagtccgaggcgggcggatcacgaggtcaggagatcgagaccatcctggccaacatggtgaaaccccgtctctactaaaaaaaatacaaaaaattagccgggcatggtggtggtcgcctgtagtcccagctactctggaggctgaggcaggagaatggcgtgaacccaggaggcggagcttgcagtgagccactgcactccagcctgggcgacagagcgagactgtctcaaaaacaaaacaaaaaacaaaacaaacaaacaaaaaacagcctctcgccaggctaactaaggaaaaaggacaaatttctgtgaagtgaaatttcatagaaatgaaagagaaaaatcactgttgatcccatgggcattacaaggattataaggaatattgtgaacagctctctgcccacaaattcgataacctagatgaaatggactaattccttgaaagaaactcacacaagaagaaacagacaatctcaatagccctatatgtattttaaaaattgagtcaataattaataaacttccaaaaaataaagcaccaggctcaggtgagttcactggtaaattcaatatgttccagaaaataggaggagagacttgcatggttcattaaagttcaaattataactgatttacattttcaactatatttacttttaaaatgcttgactttcccattttaaaatctaaactagacatcttaattggtgaaagttgttgaagctacttgttgatagacacatgctgtcaagtgaagtagttttataggtatgggttttttctcctcctccaccagggtgggtggaataagttgatttggccaatgtgtaatatttaaactgttttgtaaaataagtgtctggccatttggtaggatttctatgtgtgaaaggtcccagaatcaaaatggtacatccataatcaaccatttaaccttctttgttctaaaacaaacaaaaaccaaagggcactggttggtagggtgaggtgggggagtattttaatttttggaatttgggaagcagacagctttactttataaggttggaacagcagcactatccatgaaatataaaccaaaaatctttactgtttctaaatttcctagattgctattatttggtcctaagttgagtattccacagaaagtggtaattatcttttctctcttcctccattagaaaattaggttaataatggattcctataatgggagcatcaccacttactaaaacacacatagaatgatgaataaaaaaatttttctaggattgtcttttattctgccacatttattgataaacagtgaagaaattttttaaaaagttttatgaattttttgtcacatcatttttagaaatgttctacctgtatatggtaatgtcccattttaaaaatattggacatcttcaatcttaaacatttctatttagctgattggttctcacatatacttctaaaagagaaattttatgttataagagttacttttttggattagatttattaatctcagtgatgtactattctgacattttaggaaggaggtaattgtttttaatgatggataaacttgctggtgttttggatcttacgatgctgagcatgttctgcactggtgctaatgtctaatataattttatatttacaaacatacgtgctacccagagattaatttagtccacagaaactattgacccctcttgagatgacaacatatacactcctaaatcagtgtgtttagacttttcaggtatctaactcatttccaaacatgcagcatgtttataaacctcttgatttccagcaacatactatagaaaacacctgctattcaaaacacaacttctcagtgtcatccattgctgtcgtgagagacaacatagcaatatctggtatgttgcaagctttcaagatagcctgaacttaaaaagttggtccattagttgtatctgatggatatataaatttgcctcctagttcactttgtgtcaagagctaaaactgtgagcctaactttctcttactggtgggtaataactgaaaataaagatttattttcaagctcaaaaaaaaaaaaaaaaaaaaagaaaatcggagcagagagaaacacttgctgactcattctctgagaccaaaaatatgtaaataccagaaccatggccagatgtggtggctcatgcctcgagaccagcctggccaacatggtgaaaccctgtctctactaaaagtacaaaaattagcctggtgttgtgtcgggtgcctgtaatcccagctactcgggaggctgaggcaggagaatcgcttgaacctgggcggcggaggttgcagtgagctgagatcacgccactgcacagagcgagtctcatctcaaaaacaacaacaaaaaaccccccgcctcccaaaaaaaaccaatcaaattttttttttttttttttgagacagagtctcactctgttgcccaggctggagtgcagtggcgccgtctcagcttactgcaagctccgcctcccgggttcacgccattctcctgcctcagcctccccagcagctgggactataggcgcatgccaccacacctggctaactttttatatttttagaagagacggggtttcaccgtgttagccaggatggtcttgatctcctgaccttgtggtccgcccaatctcggcctcccaaagtgctgggattataggcgtaagccactgcacccagcctaaaaccagtcaatatatttttagaaagaaaatctgcagaccagtatctctcataaacatagatgcaaaaatcctcaaaacaaaatattaataaacggaatccaagaatatattaaaaatacaccatgaccaagtagaatttatccaggtgtgcagaacagtttcaacatttgaaattaatataatccatcacatcaacaatctaaagaagaaaaataggctgggtgcggtggctcacacctgtaatcccagcactttgggaggccaaggcgggcagatcacaaggtcaagagatcaagaccatcctggccaacatggtgaaaccctgtgtctattaaaagtacaaaaattagccgggcgtggtggtgcacacctgtaatcccagctactcgggaggcagaggttgcagtgagccgggattgcaccactgcactccagcctggcaatagagcaagactccatctcaaaaaaaaaaaagaagaaaaatatatcaatagatacagaaaaagctcttaaaaaatctagcttctcttcatgataaaaagcctcagcaggccgggcacggtggttcatgcctgtaatcccagcactctgggaggctgaggcaggtggatcatgaggtcaggagatcgagaccatcctggctaacacagtgaaaccttgtctctactaaaaatacaaaaaattagccgggtgtggtggcgggtgcctgtggtcccagctactctggaggctgaggcaggagaatggtgtgaacccaggaggcggagcttgcagtgagccaggatcacgccactgtactccagcctgggcgacagagcgagactcggtctcaaaaaaaaaaaaaagaaaagaaaaaaaagaaaccctcagcaaactaggaatagaggggaatatcctcagcttgataaaaaacattgtccaaaaactaaaaaccctacaggtgacataaaactctgtggtggcaaatgagatgctttcttgctaagatcaggaataaggcagtgtcccctctcactattcctattctattgaacctcctgttggaagttctggctaatccagtaagataaggaaaggaaataaaaggcatatatattcagaatgaaggaacaacctactttgttcacaaatgaccaacacaatactgaaaagaacaaagtcaaagaactgatcctttaagacttgctgtaaagttatagtaatcaagacaatgtggtattagcaaagcagcagacaagtagattagtggaacagaagagtccagaatgtaccgcacaaatatagccaacatgttttacaaagggacccaggtaattcaatggagaaaggatagtcttcccaagtggtactagcgcaattggacattcatatttcaaaagaaaaaaaaatctagacacagactttacacttttcataaaaattaactcaatatagacctaattgtaaaacactaagctataaaaattctagaagataacataggaggccgggcacggtggctcattcctgtaatcctagcactttgggaggccaaggtgggtggatcacgaggtcaggagattgagaccatcctggctaacacggtgaaaccccgtctctactaaaaatacaaaaaattagccgggcgtggtggcgggcacctgtagtcctagctactcaggaggctgaggcaggagaatggcatgaacccaggaggcagagcttgcagtgagcggagatcatgccactgcactccagcctgggtgacagagcgagactccgtctccaaaacaaaacaaaacaaaaaaaaaaaaaaaaaaaaaaaaaatagaacattttggcttttccagtgagtctttagaaacaacatcaaaagcatgaaaaaagaaaaaaataattgataggttgaatacaaatacaaaatttagccaggcatggtggcacatgcctataatcccagctactggggaggctgaggcaggagaattgcttgaacctgagaggcagaggttgcagtgagccaagattgtgccatagcactccggcctgggcaaagaagcgagactccgtctcaaaaaaaaaaaaaaaaaaaaaaaagtggcacattttggtgtggcacattctgccatcttttatatctaaaatttacaggtggctcatgcctgtaatctttgggaggccgaagtgggaagattgcttgaggccagtttaagaccagtctgggcaacatagtgagaccctgtctctacaaaaaactacaaaaattagctgggcattcctatagtcctagctactcgggaggcttaggtgggaggattgcttgaggctgcagtgaacaatgattgtgccagtgtcttctagcctgggtgacagagggagaccctgtctctaaaaacaaacgaaaaatccaactcttacaactcaataattaaaaaaacaaaaaacaaaaaaaacaacctgggccaggcatggtggcttatgcttgtaatcccagcactttgggaagccgaggcaggcggatcacctgaggttaggaatttgagaccagcctagccaacatgacaaaaccccgtctctactaaaaatatataaaaattagctgggtgttgtggcgcttgcctgtaatcccagctactcaggaggttgaggcaggaggatctcttgaacccaggaggtggaggttgcagtgagccgagatcatgccactgcactccagtctgggcaacagagtgagactccattcccccgtcccctcccaaaaaaaaaaactaattaaaaaatggataaaagacccaaacagacacctcaccaaagaagataaacagatggcaaacacacatattagaagatgctgaacatcatatatcattaaggaattgcaaattaaaacagatactattatacacctattacaatggctaaaatccaaaatgctgacaacaccaaattctggtgaggatgtggagcaacaggaacgttcattgcttcctgggagtacaaaatggtacactttagtaagaaactgccaaactgtcttccaaactaaatatactcttaccatatgtcccagcaattgtgctccttggtatttatccaaatgagttgaaaatctatgtccacaaaaatctgcactcaaatatttatagcagctttattcataattgctgaaacctggaagcaacaaagatgtccttgaatagttgaatggataaacagtggtatatctatacaatgggatattattcatttaagcacattgcttaaaaagtaatgtactatcaaaccatgaaaagatatggaggaaccctagattcatattgctaagtgaaagaagccaatctgaaaggctatttactgtatgattcaaactctgtgacattctggaaaaggcaaaactatggagacagtgaaaagatcagtgatggccaggagtgggggagagggaagggagggagggatgaaccaggtggaacaaggatttttagggcagtgaaactattctgtatgatactgtaacagtgggtgtgcctcatgacacattagtgaaaacccagtgaatgtacagcataaagagtgaaccctaatgtaaaccctaatgtaaattatgaacgtttgctaataatgtatcagtactatcaattataacaaatctgccacattaatgcaggatgttaacaataggggaaacagtgagtgaagagagggtatatgggaactctgcattttctgcttaattgttcaggaaacctaaacctggtctttaaaaggctggggtcaggggagggatgggaagcccatttagagggagagactgatttcccacagctttttaaatgtctgagggctcccaagctaggtggcaaaaaccaccatgtagaaaagcctgggcctgagtaactacttattcaggtgccattctcagtgctttacataaattagctcacttaattcctgagcgataatcccatgaggtaggaactattatccccactataaaggaagtagaatattataatacattatccccattatagaggaagtagaagcacagagagattaagtagggtgctcaagattgcacagctgtaagtggagcaaggatttaaatctaggtattaggatatacaactaaattaccatcttattctcattctataaaccggtcagtctttttagtaaggaaaatcatctcaatttattattttacacaccccaagtcagtgcagatggctttgttccaacctggagaggtaaagggtctttgtagaggtaaaggtctgtctttgtaggccttcacatacagcctctccagggactgtcttgaggaatactttctgagaacttcttgaagctctttaaacaggaaccaacttgtatttttttttcctcttttttttgagatggagtctggctctgtcacccaggctggagtacagtggtgtgatcctggctcactgcaacctccacctggttccagcgattcttgtgccccagcctctcgagtaggtgggactacaggtgtgtaccaccatgcccagctaattttttgtatttttagtagagacagggtttcactatgttggccaggctggtctcgaactcctgacctcaggcgatccacccaccttggcctcccagagtgctgggattagaggcatgagccactgtgccaggcctggaacccacttgtattttttccttggagtccagaaattctagactgttgctggaaataagagtggcaaaataggtacttttcaacaatttctaacacttttgtctatttttccaatgtgtctttggcctgtgcatattgccttggcagcccctcccaatggtcactgagtcctggagatctggccagtccttcttcatcttcactgcgatcacccctgtcccagcctccctgtctctcacctggatccttgaacagcagctaattgtaggctctctgtatacctgaaaggctccagtcaggaggcaaaagccatgtgttatttgtacagaaagataggcaaccgtaagtactgtaattccagaacatcttcattacctaaaaagaaaccccataaccattagcaatcacttctcatttcctcttccctccatcccttggcaaccatttatctactttttgtctctgtaggtttgcctattccagacatttcttataaatggaataatacaatgcatgtacttttgtgtctggctttcacttagcataaagttttcaaggttcaaccgtgttgtggcatgtgtcactatggatatactgtgtggattgcatggatataacacattttgtttatccattcatcagttgatagacgtttgagttgtttatactttttggctattatgaataatgctatgaacattcacatacaagtctttgtgtaggcatatttttaaatttctcttaggcatttacctaagagtgaattgctggatcatatggtaactctgtttaacattttgaggaactgccaggcaggtttctacagtgactgatgactaacaatgtaacatgggcatctttttttttcctctttttctttttctttttcttttttttttaagaccagagtcactctcacccaggctggagtgcagtggcgcgatctcagctcaccacaacctccacctcccaggttcaagcagttctcctgcctcagcctcataagtagctgggactacaggtgcatgccaccatgcctggctaatttttgtatttttagtagagacagggttttactatgttggccaggctggtctcgaactcctgacctcatgatccacctgcctcggcctcccaaagtgctggaattacaggcatgagccaccacacctggccaatgttgggcatcttttcatgagcttattagccatttgtataactctttggagatatgtctattcaaattctttgtctatttttaattaagtcatttgtctttttattaagttgtatatatctggatactagaccctagttggagtatatgatttacaaatgctgcatcccatcctgcgagttgtcttttaactttgtttattttttatttaaaaaaaaatgagacaaggtcttactatgttgctcaggctcttgaactcctggcctcaagtgatcctcccatcccagcctcccagtgtgctgggattacaagtgtatgcgactgtgcggggcctcttttaattttctggatagtatactttgacacagaaaagttttgaattttgatcaagtccaacttatctattttttttgattgcttctgatttaaaaaaaaaattttttttttgagacagagtctcacactgtcacccaggctagagtgcagtggcacgatcactgaaacctccacctctcaggttcaagcaattctcctgctttagcctcctgagcagctgggattacaggcgcatggcaccatgcccaggtaatttttttttttttttgtatttttagtagagatagggtttcaccttattggccaggctggtctcaaactcctgacctcaggtgatccacctgccttggcctcccaaagtgctgggattataagcatgacccaccgtacccagcctgtttctgattttagtgtcctatctaagaaactgtggcataatctaaagtcactaagatttatacttatgttttattctaagagttttatagttttcagtcttacatttaggtcttttaaccattttgagttacattcatttttttttacatgtggatatctagttgtcccagtgccatttatttaaaatactattttctaattgaagggtcttagtacctttgtaaaaaaaaaaaaaaaatcaattaactggctggatgcagtggttcatgcctctgattccagtgctttgggaggccaaggtgggaggttcgcctgaacccaggggtttaagcctgcactgagctatgtcacactagtacacgccagcctgggcaacagagtgagacctggtgtctaaaaaagaaaaaaaatcaattagctatagatgtatgggtttatttctggactctcaactgtatgtctattgttataccagtaccacactgtttttattactgtagctttttggtagatactgaaattgaaagtgtgtgtcctctttttctttcttttcttttttttcttgagatggagttttgctctgtcacccaggctggagtgcaatggtgtgatctcagctcactgcaacctctgcctcctgagttcaaatgattctcctgcatcaacaggcacccaccaccatgcccagctaatttttttttgagactgagtctcgctctgtcgcccaggctggagtgcagtggcgcgatcttggctcactacaacctccgcctcagggttcaagcgattttccgcctcagcctccagagtagctgggattacaggcgcctgccaccaagcctggctaatttttgtatttttagtagagatggggtttcaccatgttggtcaggctgatctggaactcccgacctcaggtgatctgcccgacttggcctcccaaagtgctgggattacaggtgtgagccaccgtgcctggcaatttcagtcttttacaatttagtgatacttattttatggcctaacatatggtctgtcctagagaatgtttcatttgtactgagaagaatgtatattctgctgctattgggtggaatgttctgtaaatgtctgttaggtctaattggtttataattagtattggtaatataattggtaacatttattgttgaattatctatttctgtattcaattgtgtctggttttgctttatatatttggactcgttaggtatgctaatgtgtaaaattatatcttttttggtggattgatcttctcaattttataaaatcttttggatctagtaacaatttttgtcttaaagtctttttctgatattaacatagaccctccccccaaccctagtacttttgctaccatttgcttggtgtatctttttctgtccttttacttccaacttatgtctttgagtctaaagtgtctcttaaacaaagcacatttttggattgtgtgtgcacttgggtgtgtatcttttaaatgcattctgtcgatctatgtttaatccatttacatgtaattattgataaggtttatacatttgtcattttactatttgtgtgttatgtcttaagtctcttttgttccacatttcttccattactgccttttttgtgttagacattttattttgtaccattttatctctatcatatatttactagatttttaaagtttttttgtggttgccatagggattaccattaacatcttattctgaactatctcattctgattaatactaattcatgccacttgtatacaaaaattttgcttcttatatagctgttcccctcctcctttatgctgttattgttacaaatgacatctttatacatagtctacccatcttagtttataattactgcatttaagttaccttttaaatcagatggggacaaaaaatgagttacaaaccaaaatcatttatatttacttatgtagttccatttactggtgctctttatttctccatgtggattcaagttactagtttccttccattttggcctgaaggatgtcctttagtattttatgtagggcagggtggctagagatgaactctgtttttgtttatctgggaatgttttcatgttgccttcatttttgaaagatagtttggccaaataacaaattttttcatagtctttttctttcaacactttgaatatgtcaacccactgccttttttttcatttttaatttttgtggctgcatagtaggtgtatatatttatggagtacatgagatgttttgatacaggcattgcattcctgtaataatcacatcatggaaaatggggtatctagtgcctcaagcatttatcctttgtgacaaacaatccaattatacttagttatttttaaatgtacccattgccttcttgtttccatggtttctgatgagaagtcagttgtaaatcttattgagactcccttgtgtgatgagttgcttttatcttgcctctttcaaaattctgtcttttgagggtttgattatgatatgtctaggtatggagctctttgagtttaacctacttggagttcactgagcttcttggataggtagattaatattttccatcaaatgtgagacattttcaaccattctttcttccaatattctgcccctttctctttttttatgtgtatatgggtacatttggtggtatcccaaaggttttagaagttttgctcattgttcttcattcttgtttctttctttttctcagagaggttaatttcaacagatctgtcttcaagtttgctgattctttttctgtcaaatctactattattaaacctcttcagtgaattctcatttcaactattgtactttccaacttcagaatttgtgctttcttccccactacagttttatctcttctttgttattctgtttgggcatcattcttattctttcctttatttctttagacccggcttcctttggctctttgaacatgtttaaaatagctgatttaaaatctggtaataaggtaaaataccacatagcttgctgtttctactagaattcaacttttttttttttcagttgaagttttctgggttgccgcaagcttttggctaatttccagagttctgtgaaagttgattttgatagtatgtggcaggtttttcaatgcttttatgaagggagcaaactttcagtagttcgtactggactattttactggatcttgatttagacaaactatagagatttttgagacaactggcaaaaactgaacatagattggttattagattattttaaaattatgtttttttagataggaaaattgtattaaggtcatatatatatatatatatatacacatatatgtgtgtgtgtatgtatatatatatatatatatatatatatatatatttttttttttttttttttttttttttttttttgagatggagtctggctctgtcacccaggctggagtatggtggtgccatctcggctcactgcaacctccgcctcccaggatcacgctgttctcctgcctcagcctcccgagtggctgggactacaggcgcccaccaccatgcccggctaattttttgtatttttaatagagatggggtttcaccgtgttagccaggatggtctcaatctcctgaccttgtgatccgcctacctcagcctcccaaagtgctgggattacaggcatgagtcaccgcgcccggctcatatatgtatttttaaagcccttatctgttagagacatagtggtttttagggttttctgaaatttcctttcagatactctagctcacacatcagaagagcatgtgcaggaagagagatgaaataatggtacacgttgatggttactggagctggatgctgggtacatggaggttcactctaccattttatttttgtatttgaaagttttcatgataaaaagtttttaaaaagagaaagggtaccttgcgtccaaacaagtctgtatttaactgaaaaaaaaaaataattgcattcctaactggccttgaatagaagggaataaatgtcctgggagatagatggcatgtttgttgaaagaatgaagggtgaagagataggatcaatcaggcacccccaggacaaaaggaaaacttatacagcaagtaaagacatgtagctatcttgggctgaaaggtaagggaattaattggtcaagtccaggctcaactctggcccccaactcccaagtccatggtctcaactcatttcccacaaagccttcctggagctagcaagagaaggtgttcccacctgagactattccattttgcctgaacagcactatgaacaagacccaaaggcagagctatgcacggaggggcaggcctgggatgaggtaggcttctgtcctaagtttctcaacagcctcaagacatcaactggggaaaggaactttctctggtgaccctatacttaaccagtaaagcttcaatcatcttaaatgatgtaacaaaatgtgcatatgtaagtttttacaccataccctaaatacaaggacctcagaaccctgaggagtatgggagatccacccagaaaatactccttgggcagcacagtgcaaggcctggggcactgggtgctcctgcattcaaagcccaaggaggacctagctaggttgctctgccactagctctctccaaaggggagagccaccagggaagacaagtgccctgtagccttggctaaaagaggagggcttgggaaatacggaccaaagcaagacaggcaagaacccatcattccttcactttgactgttacccctgtccttaggaagagggacaggaaatcaattttaagacacaactcctggacaggtttgtggacacatctggggaatatgaacctcctttgcagccaggttgggagagaaataaaggaaaagaagtaggggttggggtggagccaccagagagaagagcaggctgaggtgctgggccaggggcactgctgggcagagcacaagctgcaggacctgggagcattgctacttggcctcattgtgttgtcaccatcaccactgccagcataccaggcacagcaggggcagctcctgggtgtgaggcaagtctggcatctctaggaagtacaatcttctggtcactttggaaaaggaggggccagacgatgccagacatcatccatagaggtgagatttgaatccagcaccccgtgtagtgccaccagagtccctaactaaaggtaccccaggtccatattacaactacttgattaaagaacaggtttattggtgacctgagggagccaaggtctcctttgtgaccctcactcccaggtggtatcaggctgcaaggccctctatgggtagaaaagccaatcacatgatccatgggcattcctggcaagaggtcagatctctctactcctaattcgaaaacttccaaatcctgatttcagagtcaacagcaaggtcagaggctagagtcctgatgggcatggagctcaggaggctggcgagttgctcagcaacgtctgtggggctgcgcacatggaagtagaggccaggaaggccacaggaaaattgccccaaaagaagtttccaagagggtttacgcttggacagggcatagaacctggccgtgagattgcactttgggtatgatggggtcagtcaccgagcaggcctggggagcagagaacctccccacttgccctgggcatgccaaggctccatggtctaggctcagtggtgccaccacagcctgtcacatgtcccagctcctcactgctgggacatctccaggttcttgatgggatacaggtaccacatcactacccctgaagggttgatgatcactgtgaagttggtttcatctcggaggccactgatgatgtcacctgagtagacgtcctgggcctgcagtggggagggacatcaccaatgccaccatgagagtggcggcacagagaccccccccgctagaggatgtagaagccttctgcctggactttggcctgtctgtgctgggcttccagtatgccctacagaagtgggagccctgaatccccatcacttctccaccagcaaatccagcaggtgcccaagcacgggcagtggagaaagccccagcccatggaaaactgtgaggaacgtgccagcaagggctgacccttgggaggagtacagccgtagaggctaatgggattcatatttatatgcagtagttctgtttgcataggttgaaaatactggtgcagagcacggcactggctgcagctctcagtgcctgcagctccccatgggcacctgccagaggccctaagcccacggctcaggggaggccatatgtgaacaaccaccccccataataccctcccacagaaatctgaagcccaggcgggtggctgcaggcagccgggtgctcacctcatatatcacagacccggtgaagttcagctggccaagggaggagtggtagcgataaggcatatcggtcctgcagctgaagaagactaaggcgctagccttgttggacagaggccgcatgtacacttcgatgagagatttttcctgggcacagaaggtggctactggctggggtcccttgctcagacaggacctaccattgcctccctggccctccctgagttctgggtcccccagttcacagctccatgtcacacaggtttagggaggatgccacgggcctccagcaccccagcttatctaaccctatctgcccaccttccctgactcagcagatactcatcaacacctactctgagcccggcccctatgctagcacactgagacaagtgctgcatgaggccctgccccagaagctcataggacaacgggagggataaacgcagaaacagggaagcgcaacaacagtacagcgtatgagtgctggccccaaacagctgccagtgctggcctggagggtgctgtccagtgggaacagtgaactctgttccaggagggtggagagtggagctggatgtgaactcccatcctccagaaggttttccaggcccagctccaccatcagcccctctggcagggaattgttacttcctctgggcatcaccagttctataggtgccttccatagttctgtaggtttctttttaccagaatccaggatttggtaaagagcaaaggcagacaggcacagtggctcatgcctgtaatcccattactttgtgaggccgaggccagtggatcagctgacgtcaggagttttgagagtagcctggccaacatggtgaaaccctgtctctactgaaaaaaatacaaaaaaaattagccgggtgtggtggcgcacacctgtaatcccagctacctgggaggctgaggcaggaaaatcgcttgaacctgggagccagaggttgcagtgagctgagatggtgccactgcactccagcctgggctacagagtgagactccatctcaaaaaaaaaaaaaaaaaaaaggctttgaggtgacactgaagtccagtcttgtttgtaccaactgtgtagccttgggataaagttactcagactctcgaagtttcatttttctcatttgtaaaatggcaagataactaccttgctgagaaaaattatctaaaactcccagcacatggtaggtactcaataaatagcagccaccagtagtcgtagtattccttggctataacagcttctcctggccgagtgcggtggctcatgcctgtaatcccagcactttgggaggctgatacgggtggatcacctgaggccaggagttcgagacaagcctggccaacatggtgtctctactaaaaatacaaaaattagctgggtgtggtggcaggcgcctgtagtgccagctactcaggaggctgaggcacgagaattgcttgaacctggcaggtagagattgcagtgagtcgaaattgtgccactgcactccagcctgggtgacagagtgagaccctgtctcaaaaacaaacagaccagctcctcctgctctggagggaagtccaagctctctgcaggccatcacgggtgtatagaagctctgtgcctcacccttgctatgtgcacttatgtggctgacacctctcatccccgactcccttgagctgtcctgctcagccctgctctcacccagcaagaggaggacagttggagcagctcccatcagagtcctcaaccataagcaaccagaaggggtagccctggttggggactgggcgactcctgtacctcgccaggtgttgcccccagggaggctggcagcctttctctcaggagaacccagttcctcagccctccccttccttccctccacaccctagtaccttgtgaatcctgcgtccctggatgcctaagggatcctggttgattttgatcatgagtggattctgcagaatgtccatgttctgggcggagatggtacgcaggtctgtggacatcaagaggggggctgccagcaccgtccacagggccatctgggcccgggattgctctaagctgagaccaaagttcccaatgagcagctgggggcagagaagaggagtagtcagctctcatctcctcaaggaggtagacacagggaccatccccaaacttgtagccgaggaagagcaattagggattagggaaagatggctgtatgtggaggaggcctggttcagcaaacaccattccctagccctgtggccttgggggagttaagtcaccttccatctgagcttcagctttttattttccatcaagaacaggagtcggcggtaggggggtgggcagatggccaggtgcggcggctcatgcttgtaaatgccagcactttgggaggctgaggtaaggaaggagaccactactactcctgctgccctcctctcccaaccttgcctagttcacaagacaggaggagagaaaaagcaaaaagttggaaataaacaaaagtaagataaatagccagacaaccatggcaccaccacctggccctaggagttaaaaaaaaaagtaataataataacatcaacccctgacctaaactacttgtgttatctgcaaattccagatactgtatgaaaaaagcattgtaaaactttttgttctgttagctgatgcatgtagcctccagtcacgtttcccacgcttgcgtgatgtatcacgaccctttcacatggaccccttaaagttgtaagcctttaaaaaggccaagaatttctttttcagggagctcggctcttaagacacgagtctgccgacactcccagccgaataaaaacctcttccttctttaatctggtgtctgaggagttttatctgcggctggtcctgctacagaggcaggtgaatcacttgagcccaggagttagagaccatcctggccaacatagcaaaacctcatttctactgaaaatataaaaattacccaggcgtggtggtaaacacctgtaattccagctacttgttcaagcacgagaataacttgaaccagaatgtggaggttgcagtgagccgagattgcaccactgcactccagcctgggcaacagagtgagactctgactcaaaaaacaaaaggccaggcgcggtggctcacgcctgtaatcccagcactttgggaggctgaggagggcagatcacctgaggtcaggagttcgaaaccagcctgaccaacacggagaaaccccatctctaccaaaaatacaaaattagccaggcgtggtggcgcatgcctgtaatcccagctacttgggaggctgagacaggagaatcgcttgaacctgggaggcggaggttgcggtgagccaagatcatgccattgcactccagcctgggcaacaagagcaaaactcagtctctaaataaataaataaataggctgggcgtggtggctcacacctgtaatcccagcactttgggaggctgaggcgggcagatcatgaggtcaggagtttgagaccagtctggccaacatggtgaaaccccatctctactaaaaaaaaaaaaaaaaaaattagctgggtgtcatagcaggcgcctgtaatcccagctactcgggcggttgaggcaggagaatcgcttgaacctgggaggtggaggttgcagtaagccgagatcgcgccattgcactccagcctgggcgacagagcaagactctgtctcaaaaaataaataaatcaataaaaaacaaaaaccccatgggggtgatgggggtggtaatatgccctggctacatcacaggttgttcagatgatcaaatgggctcctgttgtcaaaaagcttataaactaggtcaagtcaataaatgtcccaaggtgacagtggtaagaaacagaacgggacaaagtccctgtacctaccactggccacacccacttgccctagccacagctgaatggaccaagggggactcctgaccccagggcaagcaatccatagtcaggacacaattacaggcttagtgacaacaatttaagcactgtgtgcccatcactgtgccaagcatttcagagttattttaaccctcaaccctataaggtagctactattcttattttccaattgacaaaactgaggcacagaacaaattaagttacttgcccgaggtaaagtggcagagctagagctgggactccacagcaggccagttcctgctcctccaggttgctccctccacctggcttagcacttgtaattcttataatcatcataggatcaatcaggtagtaaatgcttgttgactaacagataactataaagctataaattgcaacaacaacaaaatgtcacagggcaatgaccgagatagaatggaagggctagaagcaggactgtgagggccagttgtccctgtggaggatgaggcaggaaattgacaaaaggatcagaggcacacgggggagagcagtccaggcactaggaatagcaaggtcgtgatcttcaacctgcagagcaataacatcttattccagggtcactacagacccaagttcttgagctttcagaaacatcagaattgcctggggagatggttaacagtgttcttcccctgaacattgtgatgcaaaacgtgggggatggggccctggaaaccagcttctaagtcaagtctaaagcaaccagttcagggacacatttcagaagcgctgacctagaacccggcagtgagcctccaagaaggaagaaagcacagggcagtggggagcagggtcgtcacagatggtgggcctagggacatccccctccatcctggtaccatgtcagggtcattccagtgcccagggccggccactggctgcagtatgtcctggtgctccacgaaccaattcaggatggagagcacgctccaccaggagtcctggatgtcatcatagttacgccagaggttgcagatgtccgccagcagactgtagttcacctggatgtcgaggggaaggcagagtccagcaccagaatcacacgctgcagcccagggacccacacaggagttgaggaggctcagcaggagagacagagagtggggaagagggaagagaacaggccccaccggcttgctcaggatgaggagggcctcagagggtggccctgctctggggctaccggggtctcccttctgtgcatgctggtgccaggagcctaccctgccttctcatgccagcttgggtcaaacccagggtgtgggcccaggctggtgcacccacaaacaaccctccctgacacccacccacccccatgttctctcagtgagaaactgctgtctgctttcttctcagctccagaggcctgagcccaccctttttggtgtcaaacatgctaagggagccctcatgagcccacaggctcctctgaggcttggccccacctgcctggcctccccagccttctgggtctcctcgcctaatgggcacctcctggaatcctgggcactgtgtgccagcacagatggctctcctgcctctgatgccaactccttcagcccacttcacaagggcctcttctctaaggcccgccactccctccaacacacacacctctctgggctggctgagcccacctgctctttgcggctacttaatgtaggtctctagacacctacaaatcaccatatgggcacctgtggtgagagcagccctggctctggaaggccccgtccctgaagcctggcactcaggaggtaaggaggcctgggtgtgggaagcgccatcaggcagggggcagaatggcttacccttggggggaggccgccttcataggctggccagctgcaggagaaggcgatggggcggcctgtggcattcagggcagcagccatcttggggtaccctagagaaagcccaacctgtttcagtcctgaggaagtgcaggaggcagtctggggccttagcccagaccttttcccaacagatgtgaagaaacaagctccaaacagtaggtgcctccccacatacccagagcctcaaatgcttccagggtgggctatgctgccactcatatttagggagcctgggagccacaatccccctaacccctgggtagggggaattgggaagctcagccaggtgggcgctgggtgggtctccatggccaccctccccgtttgcctacgtgccccagccagctgcgtaactcaccctgggcccgctcctcgggggtggagaagcagccatccagcttgagcatgtctaccttccactcggcgaaggtctgagcatcctggaccaccttgtccagtgtggtgcctgggtaacccatgcaggtgaagttgcccatgtccgcgtagatacccaacttcaggcccagggagtgaacctgtgggggtttgaggacacagtgggctcaagcaggaccctcaaggagcctcctcaaggcatatctgaccccgtcccattaaacctccagtggctcccacggaccaaaggagatggtcccagcatgctggcccggcctctgcccatgatggcccacctctcccccaacacacacctcccagcggctgtttcttgcccctaggcctttgctcctgccatcctctctgcctccaatgccatctctctgggctcagctcaagaaatgcctcctccagggaaccttcctagaataccaggctgtgtgagatgccctttctggctctcactcaacagaataggccaaaagtcggtgttcatttgtctgtttcccccactagactgtgagatctcaatcatgtaagtgagccctaagcgaggtagggtgaaaggagtggtctagccctgaggccaagggcagggctggggtgcggctcacgtagtcagccaggaaaggaatgccatgagggaagcgcttgggatccggcatcaggcggccactggcatcgcgaccaccgatccagcagtcatcaatgttgaggtatgtgtagcccatgtcccgccatccatcctgtgccatccggtcagccatctccatgaagagctgttcactagtgaggggcagagggatggggtagctcagggacccagcccggccctcacccacaccctgcctcagctctgattgaatctgggctataaaaaccatgaccttgctgagccctaagccaggtatcagtgtaaatgaccaccagagattgtgcgatgagccataagcaagctggcttgaaaggagtggctggccccaggctaaaaggcaggactgggtcaggggaagtacagggggcctggcctgaccttctaagagttatctcaggggctgggtccatgtaaggtccctgcctcgtgaccaggttggggcctgagagtccctgcagaggctccagacaggtcatggggctaggtgtcagacagtccgagtgacttctggctgcagtctctgggatggagaactctgaccttgccctcttttctagtggactctccacttcctgcccccgaatctgcagggccctgggcaaggctcatcaggtgagtgtggaccttactcaccttatgcagttctttgggtcctcatcacagttaatgttgcagcggaagcgttcccaggccagccagcccatgggtggtgtctgcaggagcccattgtccagcatcagcacctgggccacatgtcccagcaagagcactagggggcaagggaggaggggatggtgactatcagttgcccccacagctccagccctcatcccaccccatctgtatgttgctcagccctacagaggctgcctgcctatatataagggaaactggactcctgggtttagggtagaattggctcttcctgcaatggctggctcttgcaaagcagtaagtgggaggatggtgcctgggccaggcagtggcttgaggtctggccgtcaccacagcattgctggaattagcaaaactaacaccttatgtcctaaccttcctataacccccatcagctcctcccatcccatatatagaacttaacagtacagatgctcctaggcctaccacggaactacgttctcataagcccagtgtaagttgaaaatatcacatcagccagatgcagtggctcatgcctgtaatcccaacgctctggaaggccgaggcgagtggatcacttgaggtcaggccaacatggtgaaaccttgtctctactaaaaattcaaaaacttagccaggcgtggtggcatgcgctgtactcgggaggctgaggcaagaggatcacttgaaccccagaggcggaggctgcagtgagctgagatcgtgccactgaactctagcctgggctgtgacagtgcgagaccccatcccaaaataataaaaaagaaaatattatgtcaaaaatgtacttaatacacctaacctggcaaacatcatagctgagcctagcctaccttaaaaatgtggacaggccaggcacggtggctcactcctgtaattccagcactttgggaggccgaggtgggcggatcaccgtaagtcaggggttcaagaccagcttgggcaatatggtgaaaccctgtctctactaaaactacaaaaaaataccggggtgaggtggtgagtgcctgtaatcccagctacttaggaggctgagcaggagacttgcttgaacctgggagatggaggttgcagtgagccgagatcgcgccactctactccactccagcctgggtgacagagtgagactccgtctcaaaaaaaaaaaaaaaaaaaaagtgcgacaacgcacattagcctacagctggccaaaatcatctaacacaaagcctattttataataaattgttgaatatttcatgcaatttactgaatactgaaacacaggttgtatacgtactgtggtttctactgaatgtgcgtcgctttcacaccacagtaaagttgaaaaatcgttaagtcgggaccattggccagactccaggtctcctgagccccagtccagagctctttgctctctaccacagaccctcaagaggcctcagagaggcttaagaagtaagccagccaggatgggcacccaatcagctcacctaagtgagacctttccccctcgggcctcagtttccttatctgtaatatggagttactgtagggactgtacaggcggttctccgcacatgctgatatccatcagttagggcctctgtgcttgagggagaggaagtgagaaaggaagggcccctttgaaggagaaatgattcccgtatggggaagcatctcctcccttcctgcccagctctaagtaaaagagagaggaacctgtctctccacatacccacattagggaagaagggccaaagcactccttgtagcactcacccctacccttccaagccaccccagccggtgtaggtacctgtcttcagcagcatcgctctggactcagcttccgaggacctgaccagatctggtctgcgtgtatcagctgtatgtgttgggctctggaagctaagaaacgtctgaaaagcactggggtcacggctgcctggctagctcggccgccctcaaccttaggcgtggatcgtacactcggtccccaagttgcccgccccatccccagccatcacttcccggagcttcagttcttccttcagaaatacgaaacaacgtgtcttggatgtcagacctcacaccctctgcagtgctgggagtcccgagggcctacgggccgccttcggccccgcccgggctcagaaaaaggcagccactggcttaaggtcaccaagaaagagcggaggggcggggctgcggccaggctccggacttccagccgggtccgggttcccgccctgggctccccaaaaccgcagagccccctcccaccgcacttatcctaccgaagcgttcagacctgccgccgcttctgactcgaatccggtaacctgataagtccgaagcgttccagtgagggcggggcctcacgaaggcaacccttcgcgcaacctatcagaatcccccctagcaacgctgtgccccgcccatatgggtccggcctcccagcctccctaagcccttccccactgggctcccgccctgcgtgctagcgaggcaggcattggcagaacggactcggggctgtccttcgtggcccggaccccgcgaggcctgtccttccacctctgtggggaccaagagggcaaggatcgtgccaggctcaccgtgggcgctcagtaagcggccgtgcagaggacggttgagggctttgtgcagaggaaatgagagactgctctgaagcaaggcccgcctagtgagctgctaggaaaatggaagtctgggattaatcgtctctacaaggagggtgcgtgggaggcaccaaagcaggcggtcacagctcccgcaaaggcagccggctctccttccccgcctgacgctcagggactactcgcacagactgggctacttccttcttcattcattcatcaagtatttattgagaaactgctaagtgccaaatgctttgttctgggcattgtaggggcagaaaggtgtgatattttcccttactcatcccaaaggtcacagcggacactcctacaaataaaatataggttagcaagagaaaagcataatagattgatttactcaatgttttatgtgacttgagagccttcaggaatgaagacacaaatactcagggaaatctttatttttatgtctcggtttgatgaagaatggacagccctggccgggtctggtggctcatgcctgtaatcccagcactttggaaggctgaggcagggggatcgcttgaggccagacatttaaggacagtctgggcaacatagtgagaccctgtctctacaaaaaattaaaaagccaggcaggtgcctgtggtcccagctactcgggaggctgaggtgggaggattgcttgagtccaggaggtcgaggttgcagtgagctgtgattgtgtcactgtactccagcccgggcaacagaaaaaaaaaaaaaggaataaggaatggacaactgtgtataaacgcgattagacaaaagggaatgatttaatgttaatagctgagtgtggaaacccagcaatgtctgttcagattcggattcttcttgttctctctgtgtggcattccctcctgctgggaggagggcaggaccccttctggaatgagagtcttatgacctagtatcaggcaaggtagatcagagaattcctttatggccaggcccgacacagaaaggtgggggatgtttccagtaatatttgtagttacttttttttctttttttttttcttttgagacagagtctccctctgtcaccaggctggagtgcagtggcgcgatctctgctcactgcaacctccgccgcccaggttcaagcgattctcctgcctcagcctcccaagtagttgggactacaggcgcacgccaccatgcccagctaatttttgtatttttagtagagatggggtttcaccatgttggccaggatggtcttgatctcttgacctcgtgatccgcccacctcagcctcccaaagtgctgggattacaggcatgagccactgtgcccagccaatatttgtagttgctataactcaccttagggaggaggatttttagtttctatggcctgccttgcaggagaaaaacaggagaaagaaggggggcaggagaaggtcagagagatactttgcttctgaggctcttccagtgtcctttggttcaaagtactcagcatgcccaagtgccatatttttaggcatcgctttctgagccccaacagcaccttcactcagatggccactgggtgtctcaaacataacccagaccaagcaccggccactttccacatctcagataatgacaactctcctaggtgctcaagccaaaactgtgcagtcctgcctgctctttccctcactccccacatccaactcctcagcaaatcctgtgttctctaccttcaacagccattctaattctggctgcctctccctccccgctcttgccgcgtttgtgacatctcgcctggatagtggcagcaggctcctcactggtctccagcctccactgacattgattctcaccacagaagccagagtatgccttgaaatcgctcaggtccctcctcacagccctgtctagagtaacagccctcccagatttacagagccccatcccaccccttctacccccacctcctactgtctgcccctccccaggcctcccagcctcactggccttcttgcaggtcctcaagcacaacaggcctgagggccactgcgctgactgttccctctgcctggaattggcatggctggctccctcatttccttcaagtatttgtccaatgttactttctcagtgaggcctaccctgaccactctatttgcaattgcaacctccctactcccacaatttcccatctcccttaccctcctctgtttttccatgccacttattatcttctaacacatttattatggtgtacagtattaactgaataaaatttagtaggggagacaggcaataaacaagaaaataaaagcatgagcataggaaagtttactctagcagtgagtgctctgatggaaataacaccccagggatgggacagagactgcagggcaggttgctttacaatggtcccagaggagaccactgagcagagactcaaatctgtgtccagaggcgtcctgaggagtggagctgcggttgggggtgggaaggaaggccattctaggctgcaggaactgcaagggcaaaggctctgaggcgggagccaggttcatgggcagatgtttgaggacacctccggcttccagggccttccagaagttccagtctcttgggtttggttgtgcattcctgcgaccttcaccgcaggcctcctcctccacccactagtgcagagcctgggggctgccggtgggtttcaggccagggaagcagaaatgggtaatttccagaggcagaaatcagccgaccccggtggcccggtgggtggccaacaaagcttggctggccctcgcgggctgtgtaggagcccaccctagggaggtacccagagacatccctggtttggctctgccgggaaagtgggccgagcagggagagggggaccagagaggaagagatggacagagttttccggacggtgggctgggtccgaggcccgcggaccgtccgaggggggcctctgggttcgaggccgcccgcaccgaccagtgctgtggctcgggcagttcaccgccctctcgggcctcagtttcccgccctggcagacctcgaggcggcctcggagatcccgggcctggcgaatactgggcggggaggggcgttaactccagcctcccgggcggggtctcccggctcccgcggccacgttgcagcccaggcggaggcgcgggatctcgagctgggatcgccctcttgggcttcggtgcgatcggcggcgggaggtgagagtgggcccggcgggctccgggaggaggtggccccagggaaggtgtggccgcggggaagtggcggcgaacagccccgacgcgaggacggggaaaccaaggcggcagccagggagaccctgaccgaggtgacctctgtttagggcgacaaccgggttggggctccccgcagtggccactggcccggcggtcccgcacccccagcccgcctctcctccaacaaaagaatccaggaagacggtggggcgggcgggaggcccggtgtgcggtggcctggcccccctactggtggagaggagggagcgcccttccccagacgcgggggaggggaggggtcatggccccacgggctgcccaccccctccctgtgccccagtgctgggcccaggacccccagtgaggccactcctctggcaaacatctgtgatctcttcccccttcctgggccccccctactggaatggcgtctctccccatccaggggcctggcttgtttttctccataacccttagcattaccggtccttatgttatctcttatttcactaattattctttcattaatttattagtatttattttgtttgcctacagtgtgtttccccctgtgggaatgtaggctccaggagggcgggagacttcgatttgtccactgatgtatccccattaattcaacagatccctcctgagggcctctctgagccctgcacggtgctgggtattggggttctcctgggaacttagctgagccccaccctagacattctggggctgggaacagtgctgtaaacacatatgacatcgtcgtgggatgaaggaaacaaaccagaaatgggggggtctactggtcaggtgaccttaggtcaggccaccttggtggtcagggccaccttagatgatatggtgatcatggaaggcctcccagattaggtgacttcagttaaagccaggaagtgctagaagggaaaagctaggaaccatgagggcatgtgtagctctgacctggactcaggcagggagctggggtctgaagagtaaaggtcaagacaaggggacccatccccttaagctgctcaggggttcctggctgggtggatgggtggggggattctcaggggtcagggaaggcttcccggtggaggctgtggtttcattaggcctcgaaggtggagtaggagttctcattctttgggataagctgactgggcttgagaattgttttgcaggttccctgggaaccaggtggtcgaagggctgagctgtgtggccagacaagaggtccctgccctcccccagtgagccctgctggtaagtgggtacagtgtgagggatttgggagacgaagctctgcgtctcattggccatgtaaccttgggcaagttcccctcactgcgctgggccttggttttccatgagtaaggacagctggactaagtgccgttcatgatgctgggggcacccacattcaatggctgtggttagctcttctcagctgtaccctgggtttgtgccacactcttgtgtacagagtagctccccatctggccctgaaggctgcagattgagacagaaaaataatgttttatctgaggaattggagcccctttaaataatcaggcccagacatactgaaacgcaacagctgtcaagtcttactcctcccttgagctaaagaattatctctttttctttttttttcttttcttttcttcatgtcagatcggtaatgtgcctacatggtaacaaggttcgagggtggcacagctcacacatgcatgtgaacacccaatcatcacgctcatgaactacaaaaggatcaagaattacctcttgaagccacttgctatgtggctctagagtgacaccaagtagccataaaatgctgtacactggacaccctatagttcataccctatagttcaacaatgtatagccaatcactaatcaatgttatttctttttttttttttgagatggagtttctctcttgtcacccaggtggagtgcaatggcacaatcttggctcactgcaacctctgcctcctgggatcaagcaattctcctgcctcagcctcccgagtagctgggattacaggcacccaccaccgtgcctggctaatttttgtatttagagacggggtttcaccatgttggccaggctggtctccaactcctgagctcaggtgatccacccacctcggcctcccaaagtgctgggattacagatgtgagccaccgcaccccaccaatcaatgttatttctataaaccaaggagaattcctgccaaacaactttgtcatccttgcccccttctgcctataaaaacctgtaggaaaggcccaacgcagcacaccccacggcaacttagaagtttgttctgggcagttatccttactctcgctcaagtaaactctttaaagttatatttgtgcctcagcttctgcctgtaggtcaataagattcaacagctatatgcaaataagaggccagtagaggcccaggagggtcatggaaaccctggaagcttggcctcagagttggagttgagaggaccccagatgaggggatagtttaagcacagtggtttcgatgggtctggggtccatttcagctcagctggggcctgtttctttggattttagaaagccgtgcccaggtcctgccatgcctcctgtctgatgcaatctcgttattcttttctcgaagtccgccagtgtccagttttttttgcatgatcctcacgacatccctttgagagaaaaggaaggaaagacgagcccacttctcaggagactttagggaccttagggacacagcaagcgagtaggagtcccagggctggggtccaggttgcctctggagccggtgctgttccccaggagggcacggaaccacctccctctctgatctgctgccatctctcttgcctcacagttcccgtgggagccatgaagctgaacgagaggagtgtagcccactatgcactcagcgactccccagcggaccacatgggcttcctgcgcacctgggggggcccagggaccccaccgacccccagtggcactggccgaagatgctggtttgtcctcaagggcaacctgctattctcctttgagagtcgcgagggccgggccccactgagcctggtggtgctggaaggctgcacagtggaactggccgaggctcccgtgcccgaggagtttgcctttgccatctgctttgatgcccctggagtgcgcccacacctgctggccgcagaagggccggcggcccaggaggcctgggtgaaggtgctgtcccgggcaagctt

SEQ ID NO: 89 - DNA, 837 bp, Homo sapiens
aattcggcacgaggcaatacctgcaactgaggattcttcccggggagaccgcagcccatcggcatggctcaagagtttgtgaactgcaaaatccagcctgggaaggtggttgtgttcatcaagcccacctgcccgtactgcaggagggcccaagagatcctcagtcaattgcccatcaaacaagggcttctggaatttgtcgatatcacagccaccaaccacactaacgagattcaagattatttgcaacagctcacgggagcaagaacggtgcctcgagtctttattggtaaagattgtataggcggatgcagtgatctagtctctttgcaacagagtggggaactgctgacgcggctaaagcagattggagctctgcagtaaccacagatctcataggaaatgttcaacaattctgtgaaaggtcacaggacccaattggagaaatcatatgaaaagcatagttggtcttggtgtcatatggatgagaggcacaagtgcagaggcctgtggtcatgtggaacactctgttatttaagatggctatccagataatcctgaacactgtgtatttattttatttagactaccagcaaagattaaagcatgaaatgtaaaacatctgataaaacttacagccccctacaccaagagtgtatctgtgaaagagctcctacactttgaaaacttaagaatcccttatcatgaagtttgcctgttctagaattgtaagattgttaatttccttcaatctctagtgacaacacttaatttcttttctaataaaaaaaacctatagatgaaaaaaaaaaaaaaaaaaactcgagggggggcccg

SEQ ID NO: 90 - DNA, 882 bp, Homo sapiens
  misc_feature (42)..(42): Each "n" represents a nucleotide selected from a, t, g or c, or contains no nucleotide.
  misc_feature (220)..(401): The "n" residues at positions 220, 249, 370, 396, 400 and 401 are "t" according to GABARAPL1 gene sequence in the Entrez human genome sequence database.
  misc_feature (440)..(880): Each "n" represents a nucleotide selected from a, t, g or c, or contains no nucleotide.
tatcagacatcacagtaccaccccaggggtggcagtagacancaccccagaaatttagacagggatctcttacctttggaaaataggggttaggcatgaaggtggttgtgattaagaagatggttttgttattaaatagcattaaactggaattgacaagagtgttgagcatccctgtctaacctgctctttctctttggtgccccttatctcacccctnccttggaatttaataagtctcaggcattnccaattgtagactaaaaccactcttagcatctcctctagtatttcccatgtatcaggaaggaggtgtcttatgtagggaggaggcaagtatgaagtaaggtaattatatactactctcatncaggattcttgctcccatgctgctgncccnncaggctcacatgcacaggaattgctacatgatggcagtnnnntttccancttggncttaaccaagctgactcaannnngggnnnnnnncnncaancnnnnncncacancnnnnncncnnnnnnnnnnnnnnnnnnnnnnnncnnnncnnnnnnnnnnnnnncnnnnnnnnnnnnnnncnncnnnnnnncnnnncnnnnnnnnnnnnnnnnnnnnnnnnnnnnnncnnnnnnnnnnnnnnnnncnnncnncncnnnnnnnncncnnnnncnnnnccnnnnnnnnnnncnnncnnnnnnncnccncnnnnncccnnnncccnnnncnnccnncncnncnnncnncnnncnnnncnnncnnnncncnnnncnncnnnncncnnnncnnnncnnnnnnnccnnnnnnncnnnncncnnnnnnncnnnnnncncncncncccnnnncnnncnncnncnnnnnnnnncnnnnnncnccccccccncc

SEQ ID NO: 91 - DNA, 188 bp, Homo sapiens
actcaggtaaggcctcgccaagcctctatgcaccccacaaagtttctgcctccatgccgtccacagcgcctcttcccagacagccaggcccatctgctgcccagggaagcgcaggcgcctgctagggacgctatggacaccgtgagtccaaggcgctgctcctgccttgaagccacgcgctccacgcc

SEQ ID NO: 92 - DNA, 206 bp, Homo sapiens
tgacactgctccacgtgctgcacaagttccggttccaagcctgccctgagacccaggtaccgctgcagctagaatccaaatctgccctaggtccaaaaaatggtgtctatatcaagatcgtatcccgctgacacagaaggctgccgggtggggggagggcacccccaaattcaaagaaaaccctaagtgtggatgttcagaatttt

SEQ ID NO: 93 - DNA, 4409 bp, Homo sapiens
tttcgactcgcgctccggctgctgtcacttggctctctggctggagcttgaggacgcaaggagggtttgtcactggcagactcgagactgtaggcactgccatggcccctgtgctcagtaaggactcggcggacatcgagagtatcctggctttaaatcctcgaacacaaactcatgcaactctgtgttccacttcggccaagaaattagacaagaaacattggaaaagaaatcctgataagaactgctttaattgtgagaagctggagaataattttgatgacatcaagcacacgactcttggtgagcgaggagctctccgagaagcaatgagatgcctgaaatgtgcagatgccccgtgtcagaagagctgtccaactaatcttgatattaaatcattcatcacaagtattgcaaacaagaactattatggagctgctaagatgatattttctgacaacccacttggtctgacttgtggaatggtatgtccaacctctgatctttgtgtaggtggatgcaatttatatgccactgaagagggacccattaatattggtggattgcagcaatttgctactgaggtattcaaagcaatgagtatcccacagatcagaaatccttcgctgcctcccccagaaaaaatgtctgaagcctattctgcaaagattgctctttttggtgctgggcctgcaagtataagttgtgcttcctttttggctcgattggggtactctgacatcactatatttgaaaaacaagaatatgttggtggtttaagtacttctgaaattcctcagttccggctgccgtatgatgtagtgaattttgagattgagctaatgaaggaccttggtgtaaagataatttgcggtaaaagcctttcagtgaatgaaatgactcttagcactttgaaagaaaaaggctacaaagctgctttcattggaataggtttgccagaacccaataaagatgccatcttccaaggcctgacgcaggaccaggggttttatacatccaaagactttttgccacttgtagccaaaggcagtaaagcaggaatgtgcgcctgtcactctccattgccatcgatacggggagtcgtgattgtacttggagctggagacactgcctttgactgtgcaacatctgctctacgttgtggagctcgccgtgtgttcatcgtcttcagaaaaggctttgttaatataagagctgtccctgaggagatggaacttgctaaggaagaaaagtgtgaatttctgccattcctgtccccacggaaggttatagtaaaaggtgggagaattgttgctatgcagtttgttcggacagagcaagatgaaactggaaaatggaatgaagatgaagatcagatggtccatctgaaagccgatgtggtcatcagtgcctttggttcagttctgagtgatcctaaagtaaaagaagccttgagccctataaaatttaacagatggggtctcccagaagtagatccagaaactatgcaaactagtgaagcatgggtatttgcaggtggtgatgtcgttggtttggctaacactacagtggaatcggtgaatgatggaaagcaagcttcttggtacattcacaaatacgtacagtcacaatatggagcttccgtttctgccaagcctgaactacccctcttttacactcctattgatctggtggacattagtgtagaaatggccggattgaagtttataaatccttttggtcttgctagcgcaactccagccaccagcacatcaatgattcgaagagcttttgaagctggatggggttttgccctcaccaaaactttctctcttgataaggacattgtgacaaatgtttcccccagaatcatccggggaaccacctctggccccatgtatggccctggacaaagctcctttctgaatattgagctcatcagtgagaaaacggctgcatattggtgtcaaagtgtcactgaactaaaggctgactttccagacaacattgtgattgctagcattatgtgcagttacaataaaaatgactggacggaacttgccaagaagtctgaggattctggagcagatgccctggagttaaatttatcatgtccacatggcatgggagaaagaggaatgggcctggcctgtgggcaggatccagagctggtgcggaacatctgccgctgggttaggcaagctgttcagattcctttttttgccaagctgaccccaaatgtcactgatattgtgagcatcgcaagagctgcaaaggaaggtggtgccaatggcgttacagccaccaacactgtctcaggtctgatgggattaaaatctgatggcacaccttggccagcagtggggattgcaaagcgaactacatatggaggagtgtctgggacagcaatcagacctattgctttgagagctgtgacctccattgctcgtgctctgcctggatttcccattttggctactggtggaattgactctgctgaaagtggtcttcagtttctccatagtggtgcttccgtcctccaggtatgcagtgccattcagaatcaggatttcactgtgatcgaagactactgcactggcctcaaagccctgctttatctgaaaagcattgaagaactacaagactgggatggacagagtccagctactgtgagtcaccagaaagggaaaccagttccacgtatagctgaactcatggacaagaaactgccaagttttggaccttatctggaacagcgcaagaaaatcatagcagaaaacaagattagactgaaagaacaaaatgtagctttttcaccacttaagagaaactgttttatccccaaaaggcctattcctaccatcaaggatgtaataggaaaagcactgcagtaccttggaacatttggtgaattgagcaacgtagagcaagttgtggctatgattgatgaagaaatgtgtatcaactgtggtaaatgctacatgacctgtaatgattctggctaccaggctatacagtttgatccagaaacccacctgcccaccataaccgacacttgtacaggctgtactctgtgtctcagtgtttgccctattgtcgactgcatcaaaatggtttccaggacaacaccttatgaaccaaagagaggcgtacccttatctgtgaatccggtgtgttaaggtgatttgtgaaacagttgctgtgaactttcatgtcacctacatatgctgatcttttaaaatcatgatccttgtgttcagctctttccaaattaaaacaaatatacattttctaaataaaaatatgtaatttcaaaatacatttgtaagtgtaaaaaatgtctcatgtcaatgaccattcaattagtggtcataaaatagaataattcttttctgaggatagtagttaaataactgtgtggcagttaattggatgttcactgccagttgtcttatgtgaaaaattaacttttttgtggcaattagtgtgacagtttccaaattgccctatgctgtgctccatatttgatttctaattgtaagtgaaattaagcattttgaaacaaagtactctttaacatacaagaaaatgtatccaaggaaacattttatcattaaaaattacctttaattttaatgctgtttctaagaaaatgtagttagctccataaagtacaaatgaagaaagtcaaaaaattatttgctatggcaggataagaaagcctaaaattgagtttgtagaactttattaagtaaaatccccttcgctgaaattgcttatttttggtgttggatagaggatagggagaatatttactaactaaataccattcactactcatgcgtgagatgggtgtacaaactcatcctcttttaatggcatttctctttaaactatgttcctaacaaaatgagatgataggatagatcctggttaccactcttttgctgtgcacatacgggctctgactggttttaatagtcaccttcatgattatagcaactaatgtttgaacaaagctcaaagtatgcaatgcttcattattcaagaatgaaaaatataatgttgataatatatattaagtgtgccaaatcagtttgactactctctgttttagtgtttatgtttaaaagaaatatattttttgttattattagataatatttttgtatttctctattttcataatcagtaaatagtgtcatataaactcatttatctcctcttcatggcatcttcaatatgaatctataagtagtaaatcagaaagtaacaatctatggcttatttctatgacaaattcaagagctagaaaaataaaatgtttcattatgcacttttagaaatgcatatttgccacaaaacctgtattactgaataatatcaaataaaatatcataaagcatttt

SEQ ID NO: 94 - DNA, 1587 bp, Homo sapiens
gggcgaggggcggacaccggagagacacgggaaaggggtcgggacaggagcacgtggctcagacaccgacgccgggaggccgcagaccccggacgtgtcaggcatccccgcaggcccggagcgatggcagccttgatgaccccgggaaccggggccccacccgcgcctggtgacttctccggggaagggagccagggacttcccgacccttcgccagagcccaagcagctcccggagctgatccgcatgaagcgagacggaggccgcctgagcgaagcggacatcaggggcttcgtggccgctgtggtgaatgggagcgcgcagggcgcacagatcggggccatgctgatggccatccgacttcggggcatggatctggaggagacctcggtgctgacccaggccctggctcagtcgggacagcagctggagtggccagaggcctggcgccagcagcttgtggacaagcattccacagggggtgtgggtgacaaggtcagcctggtcctcgcacctgccctggcggcatgtggctgcaaggtgccaatgatcagcggacgtggtctggggcacacaggaggcaccttggataagctggagtctattcctggattcaatgtcatccagagcccagagcagatgcaagtgctgctggaccaggcgggctgctgtatcgtgggtcagagtgagcagctggttcctgcggacggaatcctatatgcagccagagatgtgacagccaccgtggacagcctgccactcatcacagcctccattctcagtaagaaactcgtggaggggctgtccgctctggtggtggacgttaagttcggaggggccgccgtcttccccaaccaggagcaggcccgggagctggcaaagacgctggttggcgtgggagccagcctagggcttcgggtcgcggcagcgctgaccgccatggacaagcccctgggtcgctgcgtgggccacgccctggaggtggaggaggcgctgctctgcatggacggcgcaggcccgccagacttaagggacctggtcaccacgctcgggggcgccctgctctggctcagcggacacgcggggactcaggctcagggcgctgcccgggtggccgcggcgctggacgacggctcggcccttggccgcttcgagcggatgctggcggcgcagggcgtggatcccggtctggcccgagccctgtgctcgggaagtcccgcagaacgccggcagctgctgcctcgcgcccgggagcaggaggagctgctggcgcccgcagatggcaccgtggagctggtccgggcgctgccgctggcgctggtgctgcacgagctcggggccgggcgcagccgcgctggggagccgctccgcctgggggtgggcgcagagctgctggtcgacgtgggtcagaggctgcgccgtgggaccccctggctccgcgtgcaccgggacggccccgcgctcagcggcccgcagagccgcgccctgcaggaggcgctcgtactctccgaccgcgcgccattcgccgccccctcgcccttcgcagagctcgttctgccgccgcagcaataaagctcctttgccgcg

SEQ ID NO: 95 - DNA, 504 bp, Homo sapiens
agaagtcaaccagaccaccttataccagcgttatgagatcaagatgaccaagatgtataaagggttccaagccttaggggatgccgctgacatccggttcgtctacacccccgccatggagagtgtctgcggatacttccacaggtcccacaaccgcagcgaggagtttctcattgctggaaaactgcaggatggactcttgcacatcactacctgcagtttcgtggctccctggaacagcctgagcttagctcagcgccggggcttcaccaagacctacactgttggctgtgaggaatgcacagtgtttccctgtttatccatcccctgcaaactgcagagtggcactcattgcttgtggacggaccagctcctccaaggctctgaaaagggcttccagtcccgtcaccttgcctgcctgcctcgggagccagggctgtgcacctggcagtccctgcggtcccagatagcctgaatcctgcccggagtggaactgaagcctgc

SEQ ID NO: 96 - DNA, 2602 bp, Homo sapiens
gccgtgtcgccaccatggctccgcaccgccccgcgcccgcgctgctttgcgcgctgtccctggcgctgtgcgcgctgtcgctgcccgtccgcgcggccactgcgtcgcggggggcgtcccaggcgggggcgccccaggggcgggtgcccgaggcgcggcccaacagcatggtggtggaacaccccgagttcctcaaggcagggaaggagcctggcctgcagatctggcgtgtggagaagttcgatctggtgcccgtgcccaccaacctttatggagacttcttcacgggcgacgcctacgtcatcctgaagacagtgcagctgaggaacggaaatctgcagtatgacctccactactggctgggcaatgagtgcagccaggatgagagcggggcggccgccatctttaccgtgcagctggatgactacctgaacggccgggccgtgcagcaccgtgaggtccagggcttcgagtcggccaccttcctaggctacttcaagtctggcctgaagtacaagaaaggaggtgtggcatcaggattcaagcacgtggtacccaacgaggtggtggtgcagagactcttccaggtcaaagggcggcgtgtggtccgtgccaccgaggtacctgtgtcctgggagagcttcaacaatggcgactgcttcatcctggacctgggcaacaacatccaccagtggtgtggttccaacagcaatcggtatgaaagactgaaggccacacaggtgtccaagggcatccgggacaacgagcggagtggccgggcccgagtgcacgtgtctgaggagggcactgagcccgaggcgatgctccaggtgctgggccccaagccggctctgcctgcaggtaccgaggacaccgccaaggaggatgcggccaaccgcaagctggccaagctctacaaggtctccaatggtgcagggaccatgtccgtctccctcgtggctgatgagaaccccttcgcccagggggccctgaagtcagaggactgcttcatcctggaccacggcaaagatgggaaaatctttgtctggaaaggcaagcaggcaaacacggaggagaggaaggctgccctcaaaacagcctctgacttcatcaccaagatggactaccccaagcagactcaggtctcggtccttcctgagggcggtgagaccccactgttcaagcagttcttcaagaactggcgggacccagaccagacagatggcctgggcttgtcctacctttccagccatatcgccaacgtggagcgggtgcccttcgacgccgccaccctgcacacctccactgccatggccgcccagcacggcatggatgacgatggcacaggccagaaacagatctggagaatcgaaggttccaacaaggtgcccgtggaccctgccacatatggacagttctatggaggcgacagctacatcattctgtacaactaccgccatggtggccgccaggggcagataatctataactggcagggtgcccagtctacccaggatgaggtcgctgcatctgccatcctgactgctcagctggatgaggagctgggaggtacccctgtccagagccgtgtggtccaaggcaaggagcccgcccacctcatgagcctgtttggtgggaagcccatgatcatctacaagggcggcacctcccgcgagggcgggcagacagcccctgccagcacccgcctcttccaggtccgcgccaacagcgctggagccacccgggctgttgaggtattgcctaaggctggtgcactgaactccaacgatgcctttgttctgaaaaccccctcagccgcctacctgtgggtgggtacaggagccagcgaggcagagaagacgggggcccaggagctgctcagggtgctgcgggcccaacctgtgcaggtggcagaaggcagcgagccagatggcttctgggaggccctgggcgggaaggctgcctaccgcacatccccacggctgaaggacaagaagatggatgcccatcctcctcgcctctttgcctgctccaacaagattggacgttttgtgatcgaagaggttcctggtgagctcatgcaggaagacctggcaacggatgacgtcatgcttctggacacctgggaccaggtctttgtctgggttggaaaggattctcaagaagaagaaaagacagaagccttgacttctgctaagcggtacatcgagacggacccagccaatcgggatcggcggacgcccatcaccgtggtgaagcaaggctttgagcctccctcctttgtgggctggttccttggctgggatgatgattactggtctgtggaccccttggacagggccatggctgagctggctgcctgaggaggggcagggcccacccatgtcaccggtcagtgccttttggaactgtccttccctcaaagaggccttagagcgagcagagcagctctgctatgagtgtgtgtgtgtgtgtgtgttgtttcttttttttttttttacagtatccaaaaatagccctgcaaaaattcagagtccttgcaaaattgtctaaaatgtcagtgtttgggaaattaaatccaataaaaacattttgaagtgtg

SEQ ID NO: 97 - DNA, 2000 bp, Homo sapiens
attttcctggggctccggggcgcggagaagctgcatcccagaggagcgcgtccaggagcggacccgggagtgtttcaagagccagtgacaaggaccaggggcccaagtcccaccagccatgcagacctgccccctggcattccctggccacgtttcccaggcccttgggaccctcctgtttttggctgcctccttgagtgctcagaatgaaggctgggacagccccatctgcacagagggggtagtctctgtgtcttggggcgagaacaccgtcatgtcctgcaacatctccaacgccttctcccatgtcaacatcaagctgcgtgcccacgggcaggagagcgccatcttcaatgaggtggctccaggctacttctcccgggacggctggcagctccaggttcagggaggcgtggcacagctggtgatcaaaggcgcccgggactcccatgctgggctgtacatgtggcacctcgtgggacaccagagaaataacagacaagtcacgctggaggtttcaggtgcagaaccccagtccgcccctgacactgggttctggcctgtgccagcggtggtcactgctgtcttcatcctcttggtcgctctggtcatgttcgcctggtacaggtgccgctgttcccagcaacgccgggagaagaagttcttcctcctagaaccccagatgaaggtcgcagccctcagagcgggagcccagcagggcctgagcagagcctccgctgaactgtggaccccagactccgagcccaccccaaggccgctggcactggtgttcaaaccctcaccacttggagccctggagctgctgtccccccaacccttgtttccatatgccgcagacccatagccgcctgcaaggcagagaggacacaggagagccagccctgagtgccgaccttgggtggcggggcctgggtctctcgtcccacccggagggcacagacaccggcttgcttggcaggctgggcctctgtgtcacccactcctgggtgcgtgcagacccttcccctccaccccccaggtcttccaagctctgcttcctcagtttccaaaatggaaccacctcacctccgcagcacccgacttaccaggacgcatgcccctccctctgccctcatcaaacccacagacccggactccctttctgccaccccaggctggtccggccccaggtgtggggtccgctctctccactcccagggctccgcgcccaagtgagggggcccctgccggagcctcagacacactggagttcagggctgggggggccttggcacatacctgtcccttggctatgagcaggctttgggggcccttccgcggcagccccgggggccgaggtagggtctgggggcttagaggctgggatggctcctggccccaccgccagggggcaagcgcaggccgggctgggaggcggcggcggcggctcgggctggggggtcaggtggacgctgcctccggggctggtcgcgcatccctcagtccctcggccacccgggggtcgctccctcgtgcccaccgcacctgccgagcctctttggacccagatctgttcatgcttttgtcttcgtcactgcggcggggccctttgatgtcttcatctgtatggggtggaaaaatcaccgggaatcccccttcagttctttgaaaaagttccatgactcgaatatctgaaatgaagaaaacaaaccgactcacaaacctccaagtagctccaaatgcaatttttaaaatggaaaacaaaaatctgaaagaaacgtctttagtggctttaagccccaaaacgtccctaaggcgtcctcgagatgaagacgggggggagcccccagccaggtggagaccccgcaggacgcggcggcgcccggtgaccgaggcctcgcacagccggccgccctgagggtcgggccggagccagggtccaagaggggcgcgtttgtgtctcgggttaaaataaggttccgtccgcgtgctgggtcaga

SEQ ID NO: 98 - DNA, 116 bp, Homo sapiens
ttcacaggctattctactttaaaggaagcctttttattttgctgcacacaatctagcaggaatctttttttttttttaagagctgtgtcatccttatgtaggcaagagatgtttgc

SEQ ID NO: 99 - DNA, 635 bp, Homo sapiens
acttcagccctagcagcatctgcctgtgggaagcagctctccacaccagccaagggggcccccacactcccgcgctgctctgcggctcagggagcagcccacctgctggatgaggaacttgaggcaagtcaccagcccctgatcatttcgcctaaaagagcaaggactagagttcctgacctccaggccagtccctgatccctgacctaatgttatcgcggaatgatgatatatgtatctacgggggcctggggctgggcgggctcctgcttctggcagtggtccttctgtccgcctgcctgtgttggctgcatcgaagagcaccttctgtcctggtcccaggcccagggctcctcagagcaggaactccactatgcatctctgcagaggctgccagtgcccagcagtgagggacctgacctcaggggcagagacaagagaggcaccaaggaggatccaagagctgactatgcctgcattgctgagaacaaacccacctgagcaccccagacaccttcctcaacccaggcgggtggacagggtccccctgtggtccagccagtaaaaaccatggtccccccacttctgtgtctcagtcctctcagtccatctcgagcctccgttcaaattgatca

SEQ ID NO: 100 - DNA, 2136 bp, Homo sapiens
cgcgagccgcctcctccccttccccacgctcgaggaggggggcgcgggggcccggctccggcgacggccaatcggagcgcacttccgtggctgactagcgcggtataaaggcgtgtggctcaggctgagcggctgggaccttgagagcggccaggccagcctcggagccagcagggagctgggagctgggggaaacgacgccaggaaagctatcgcgccagagagggcgacgggggctcgggaagcctgacagggcttttgcgcacagctgccggctggctgctacccgcccgcgccagcccccgagaacgcgcgaccaggcacccagtccggtcaccgcagcggagagctcgccgctcgctgcagcgaggcccggagcggccccgcagggaccctccccagaccgcctgggccgcccggatgtgcactaaaatggaacagcccttctaccacgacgactcatacacagctacgggatacggccgggcccctggtggcctctctctacacgactacaaactcctgaaaccgagcctggcggtcaacctggccgacccctaccggagtctcaaagcgcctggggctcgcggacccggcccagagggcggcggtggcggcagctacttttctggtcagggctcggacaccggcgcgtctctcaagctcgcctcttcggagctggaacgcctgattgtccccaacagcaacggcgtgatcacgacgacgcctacacccccgggacagtacttttacccccgcgggggtggcagcggtggaggtgcagggggcgcagggggcggcgtcaccgaggagcaggagggcttcgccgacggctttgtcaaagccctggacgatctgcacaagatgaaccacgtgacaccccccaacgtgtccctgggcgctaccggggggcccccggctgggcccgggggcgtctacgccggcccggagccacctcccgtttacaccaacctcagcagctactccccagcctctgcgtcctcgggaggcgccggggctgccgtcgggaccgggagctcgtacccgacgaccaccatcagctacctcccacacgcgccgcccttcgccggtggccacccggcgcagctgggcttgggccgcggcgcctccaccttcaaggaggaaccgcagaccgtgccggaggcgcgcagccgggacgccacgccgccggtgtcccccatcaacatggaagaccaagagcgcatcaaagtggagcgcaagcggctgcggaaccggctggcggccaccaagtgccggaagcggaagctggagcgcatcgcgcgcctggaggacaaggtgaagacgctcaaggccgagaacgcggggctgtcgagtaccgccggcctcctccgggagcaggtggcccagctcaaacagaaggtcatgacccacgtcagcaacggctgtcagctgctgcttggggtcaagggacacgccttctgaacgtcccctgcccctttacggacaccccctcgcttggacggctgggcacacgcctcccactggggtccagggagcaggcggtgggcacccaccctgggacctaggggcgccgcaaaccacactggactccggccctcctaccctgcgcccagtccttccacctcgacgtttacaagcccccccttccacttttttttgtatgttttttttctgctggaaacagactcgattcatattgaatataatatatttgtgtatttaacagggaggggaagagggggcgatcgcggcggagctggccccgccgcctggtactcaagcccgcggggacattgggaaggggacccccgccccctgccctcccctctctgcaccgtactgtggaaaagaaacacgcacttagtctctaaagagtttattttaagacgtgtttgtgtttgtgtgtgtttgttctttttattgaatctatttaagtaaaaaaaaaattggttctttattaatttctgttgtctttttttccaagctgggagggcggggggaaaaaaaaagcactggtttgcccccagctcagtgctgttggtggctcggtcctgtatgtgtccccctcgtcggttcggcgcaggcatcttgtggtcccagcccaggagtcccacccttcccgcgtccccagat

SEQ ID NO: 101 - DNA, 499 bp, Homo sapiens
acatctgcaacacagctgtgccctgccctgtggatggggagtgggactcgtggggggagtggagcccctgtatccgacggaacatgaagtccatcagctgtcaagaaatcccgggccagcagtcacgcgggaggacctgcaggggccgcaagtttgacggacatcgatgtgccgggcaacagcaggatatccggcactgctacagcatccagcactgccccttgaaaggatcatggtcagagtggagtacctgggggctgtgcatgcccccctgtggacctaatcctacccgtgcccgccagcgcctctgcacacccttgctccccaagtacccgcccaccgtttccatggtcgaaggtcagggcgagaagaacgtgaccttctgggggagaccgctgccacggtgtgaggagctacaagggcagaagctggtggtggaggagaaacgaccatgtctacacgtgcctgcttgcaaagaccctgaggaagaggaactcta

SEQ ID NO: 102 - DNA, 1254 bp, Homo sapiens
gaattcggggcggcggcggcggaggctgccatggacgacgaggaggagacgtaccggctctggaaaatccgcaagaccatcatgcagctgtgccacgaccgtggctatctggtgacccaggacgagcttgaccagaccctggaggagttcaaagcccaatttggggacaagccgagtgaggggcggccgcggcgcacggacctcaccgtgctggtggcccacaacgatgaccccaccgaccagatgtttgtgttctttccagaggagcccaaggtgggcatcaagaccatcaaggtgtactgccagcgcatgcaggaggagaacatcacacgggctctcatcgtggtgcagcagggcatgacaccctccgccaagcagtccctggtcgacatggcccccaagtacatcctggagcagtttctcgagcaggagctgctcatcaacatcacggagcacgagctagtccctgagcacgtcgtcatgaccaaggaggaggtgtcagagctgctggcccgatataagcttcgagagaaccagctgcccaggatccaggcgggggaccctgtggcgcgctactttgggataaggcgtgggcaggtggtgaagatcatccggcccagtgagacggctggcaggtacatcacctaccggctggtgcagtagctaccgcctgacagcccctagaggcggacacacagcgacccccatccctgcaggacaaacgcccctgccctgccagaatccggcccccacagctctcacggctgctgctcctctggactccccaaggcaggtggcctccacccacgttctcccgtcctggggtgaggcttcctgtggcccagcccgccccattcacctgtggatttgtgcgagatgcagcctcagaaggaacaaggcccccagagggaggtcacctgggggcaactggtgccgggtcttcacccagaccacgctgggtcccctctgttgggggtttggggtccgggtctcccaccagccactgcttcctcctgggccctcaattccacccctcgtcttccctccctcggggccctgatgcgtggcggcccccacccggcctcggctctttactccattcacagccatgcacgcgctcaagtacaccagggtgcgagatgccagctctggagttctcggttgttgtaggaggttgggtgttttcaaatggtaaagatgttttgacgaaataaatttgcttgatacagaaaaaaaaaaaaaaaacccgaattc

SEQ ID NO: 103 - DNA, 5722 bp, Homo sapiens
ggacgcacaggcattccccgcgcccctccagccctcgccgccctcgccaccgctcccggccgccgcgctccggtacacacaggatccctgctgggcaccaacagctccaccatggggctggcctggggactaggcgtcctgttcctgatgcatgtgtgtggcaccaaccgcattccagagtctggcggagacaacagcgtgtttgacatctttgaactcaccggggccgcccgcaaggggtctgggcgccgactggtgaagggccccgacccttccagcccagctttccgcatcgaggatgccaacctgatcccccctgtgcctgatgacaagttccaagacctggtggatgctgtgcgggcagaaaagggtttcctccttctggcatccctgaggcagatgaagaagacccggggcacgctgctggccctggagcggaaagaccactctggccaggtcttcagcgtggtgtccaatggcaaggcgggcaccctggacctcagcctgaccgtccaaggaaagcagcacgtggtgtctgtggaagaagctctcctggcaaccggccagtggaagagcatcaccctgtttgtgcaggaagacagggcccagctgtacatcgactgtgaaaagatggagaatgctgagttggacgtccccatccaaagcgtcttcaccagagacctggccagcatcgccagactccgcatcgcaaaggggggcgtcaatgacaatttccagggggtgctgcagaatgtgaggtttgtctttggaaccacaccagaagacatcctcaggaacaaaggctgctccagctctaccagtgtcctcctcacccttgacaacaacgtggtgaatggttccagccctgccatccgcactaactacattggccacaagacaaaggacttgcaagccatctgcggcatctcctgtgatgagctgtccagcatggtcctggaactcaggggcctgcgcaccattgtgaccacgctgcaggacagcatccgcaaagtgactgaagagaacaaagagttggccaatgagctgaggcggcctcccctatgctatcacaacggagttcagtacagaaataacgaggaatggactgttgatagctgcactgagtgtcactgtcagaactcagttaccatctgcaaaaaggtgtcctgccccatcatgccctgctccaatgccacagttcctgatggagaatgctgtcctcgctgttggcccagcgactctgcggacgatggctggtctccatggtccgagtggacctcctgttctacgagctgtggcaatggaattcagcagcgcggccgctcctgcgatagcctcaacaaccgatgtgagggctcctcggtccagacacggacctgccacattcaggagtgtgacaaaagatttaaacaggatggtggctggagccactggtccccgtggtcatcttgttctgtgacatgtggtgatggtgtgatcacaaggatccggctctgcaactctcccagcccccagatgaatgggaaaccctgtgaaggcgaagcgcgggagaccaaagcctgcaagaaagacgcctgccccatcaatggaggctggggtccttggtcaccatgggacatctgttctgtcacctgtggaggaggggtacagaaacgtagtcgtctctgcaacaaccccgcaccccagtttggaggcaaggactgcgttggtgatgtaacagaaaaccagatctgcaacaagcaggactgtccaattgatggatgcctgtccaatccctgctttgccggcgtgaagtgtactagctaccctgatggcagctggaaatgtggtgcttgtccccctggttacagtggaaatggcatccagtgcacagatgttgatgagtgcaaagaagtgcctgatgcctgcttcaaccacaatggagagcaccggtgtgagaacacggaccccggctacaactgcctgccctgccccccacgcttcaccggctcacagcccttcggccagggtgtcgaacatgccacggccaacaaacaggtgtgcaagccccgtaacccctgcacggatgggacccacgactgcaacaagaacgccaagtgcaactacctgggccactatagcgaccccatgtaccgctgcgagtgcaagcctggctacgctggcaatggcatcatctgcggggaggacacagacctggatggctggcccaatgagaacctggtgtgcgtggccaatgcgacttaccactgcaaaaaggataattgccccaaccttcccaactcagggcaggaagactatgacaaggatggaattggtgatgcctgtgatgatgacgatgacaatgataaaattccagatgacagggacaactgtccattccattacaacccagctcagtatgactatgacagagatgatgtgggagaccgctgtgacaactgtccctacaaccacaacccagatcaggcagacacagacaacaatggggaaggagacgcctgtgctgcagacattgatggagacggtatcctcaatgaacgggacaactgccagtacgtctacaatgtggaccagagagacactgatatggatggggttggagatcagtgtgacaattgccccttggaacacaatccggatcagctggactctgactcagaccgcattggagatacctgtgacaacaatcaggatattgatgaagatggccaccagaacaatctggacaactgtccctatgtgcccaatgccaaccaggctgaccatgacaaagatggcaagggagatgcctgtgaccacgatgatgacaacgatggcattcctgatgacaaggacaactgcagactcgtgcccaatcccgaccagaaggactctgacggcgatggtcgaggtgatgcctgcaaagatgattttgaccatgacagtgtgccagacatcgatgacatctgtcctgagaatgttgacatcagtgagaccgatttccgccgattccagatgattcctctggaccccaaagggacatcccaaaatgaccctaactgggttgtacgccatcagggtaaagaactcgtccagactgtcaactgtgatcctggactcgctgtaggttatgatgagtttaatgctgtggacttcagtggcaccttcttcatcaacaccgaaagggacgatgactatgctggatttgtctttggctaccagtccagcagccgcttttatgttgtgatgtggaagcaagtcacccagtcctactgggacaccaaccccacgagggctcagggatactcgggcctttctgtgaaagttgtaaactccaccacagggcctggcgagcacctgcggaacgccctgtggcacacaggaaacacccctggccaggtgcgcaccctgtggcatgaccctcgtcacataggctggaaagatttcaccgcctacagatggcgtctcagccacaggccaaagacgggtttcattagagtggtgatgtatgaagggaagaaaatcatggctgactcaggacccatctatgataaaacctatgctggtggtagactagggttgtttgtcttctctcaagaaatggtgttcttctctgacctgaaatacgaatgtagagatccctaatcatcaaattgttgattgaaagactgatcataaaccaatgctggtattgcaccttctggaactatgggcttgagaaaacccccaggatcacttctccttggcttccttcttttctgtgcttgcatcagtgtggactcctagaacgtgcgacctgcctcaagaaaatgcagttttcaaaaacagactcatcagcattcagcctccaatgaataagacatcttccaagcatataaacaattgctttggtttccttttgaaaaagcatctacttgcttcagttgggaaggtgcccattccactctgcctttgtcacagagcagggtgctattgtgaggccatctctgagcagtggactcaaaagcattttcaggcatgtcagagaagggaggactcactagaattagcaaacaaaaccaccctgacatcctccttcaggaacacggggagcagaggccaaagcactaaggggagggcgcatacccgagacgattgtatgaagaaaatatggaggaactgttacatgttcggtactaagtcattttcaggggattgaaagactattgctggatttcatgatgctgactggcgttagctgattaacccatgtaaataggcacttaaatagaagcaggaaagggagacaaagactggcttctggacttcctccctgatccccacccttactcatcaccttgcagtggccagaattagggaatcagaatcaaaccagtgtaaggcagtgctggctgccattgcctggtcacattgaaattggtggcttcattctagatgtagcttgtgcagatgtagcaggaaaataggaaaacctaccatctcagtgagcaccagctgcctcccaaaggaggggcagccgtgcttatatttttatggttacaatggcacaaaattattatcaacctaactaaaacattccttttctcttttttccgtaattactaggtagttttctaattctctcttttggaagtatgatttttttaaagtctttacgatgtaaaatatttattttttacttattctggaagatctggctgaaggattattcatggaacaggaagaagcgtaaagactatccatgtcatctttgttgagagtcttcgtgactgtaagattgtaaatacagattatttattaactctgttctgcctggaaatttaggcttcatacggaaagtgtttgagagcaagtagttgacatttatcagcaaatctcttgcaagaacagcacaaggaaaatcagtctaataagctgctctgccccttgtgctcagagtggatgttatgggattccttttttctctgttttatcttttcaagtggaattagttggttatccatttgcaaatgttttaaattgcaaagaaagccatgaggtcttcaatactgttttaccccatcccttgtgcatatttccagggagaaggaaagcatatacacttttttctttcatttttccaaaagagaaaaaaatgacaaaaggtgaaacttacatacaaatattacctcatttgttgtgtgactgagtaaagaatttttggatcaagcggaaagagtttaagtgtctaacaaacttaaagctactgtagtacctaaaaagtcagtgttgtacatagcataaaaactctgcagagaagtattcccaataaggaaatagcattgaaatgttaaatacaatttctgaaagttatgttttttttctatcatctggtataccattgctttatttttataaattattttctcattgccattggaatagaatattcagattgtgtagatatgctatttaaataatttatcaggaaatactgcctgtagagttagtatttctatttttatataatgtttgcacactgaattgaagaattgttggttttttcttttttttgttttttttttttttttttttttttttgcttttgacctcccatttttactatttgccaatacctttttctaggaatgtgcttttttttgtacacatttttatccattttacattctaaagcagtgtaagttgtatattactgtttcttatgtacaaggaacaacaataaatcatatggaaatttatattt

SEQ ID NO: 104 - DNA, 362 bp, Homo sapiens
cgagccaatagactgaagagaccacagcaattggctcctccatctagagattttcttggcagtattccatgggatgttaagcaaaggaaaccaaaggaatcgtttcaaatggactcatggcttagaaatctttattcttagggcagtcagtagtattctaaagctttctgacaagataaaggaagtcaccaaaatttctttttttaaattgtatctaatcctcaacaacaaaccaaaacagaacaattaaacagccaaataaaacctcagggacaacatttttggtgtatttgagccctcccagcaagtttcaccttgggtttgtattttaaatgttttacaagaattgtccatgtgcttcc

SEQ ID NO: 105 - DNA, 240 bp, Homo sapiens
aaaacagacttgatcacgcacacacaataagtctttctctccgaaaccggaagtaaatctatatctgttagaaataatgtagccaaaagaatgtaaatttgaggatttttttgccaatagtttatagaaaatatatgaaccaaagtgatttgagtttgtaaaaatgtaaaatagtatgaacaaaatttgcactctaccagatttgaacatctagtgaggttcacattcatactaagtttt

SEQ ID NO: 106 - DNA, 2015 bp, Homo sapiens
cggaggcacggaagatgaggaagatgatcaggaggatgatgaaggtgaagagggagatgaagacgatgacgacgatggctctgaggggacctcaggggctgccgagctgggggggcgctcaagctgcgaggatccgggctgcccgcgagacgaggagcgggcgccaggatggggtcgatgaagtccaagttcctccaggtcggaggcaatacattctcaaaaactgaaaccagcgccagcccacactgtcctgtgtacgtgccggatcccacatccaccatcaagccggggcctaatagccacaacagcaacacaccaggaatcagggaggcaggctctgaggacatcatcgtggttgccctgtatgattacgaggccattcaccacgaagacctcagcttccagaagggggaccagatggtggtcctagaggaatccggggagtggtggaaggctcgatccctggccacccggaaggagggctacatcccaagcaactatgtcgcccgcgttgactctctggagacagaggagtggtttttcaagggcatcagccggaaggacgcagagcgccaactgctggctcccggcaacatgctgggctccttcatgatccgggatagcgagaccactaaaggaagctactctttgtccgtgcgagactacgaccctcggcagggagataccgtgaaacattacaagatccggaccctggacaacgggggcttctacatatccccccgaagcaccttcagcactctgcaggagctggtggaccactacaagaaggggaacgacgggctctgccagaaactgtcggtgccctgcatgtcttccaagccccagaagccttgggagaaagatgcctgggagatccctcgggaatccctcaagctggagaagaaacttggagctgggcagtttggggaagtctggatggccacctacaacaagcacaccaaggtggcagtgaagacgatgaagccagggagcatgtcggtggaggccttcctggcagaggccaacgtgatgaaaactctgcagcatgacaagctggtcaaacttcatgcggtggtcaccaaggagcccatctacatcatcacggagttcatggccaaaggaagcttgctggactttctgaaaagtgatgagggcagcaagcagccattgccaaaactcattgacttctcagcccagattgcagaaggcatggccttcatcgagcagaggaactacatccaccgagacctccgagctgccaacatcttggtctctgcatccctggtgtgtaagattgctgactttggcctggcccgggtcattgaggacaacgagtacacggctcgggaaggggccaagttccccatcaagtggacagctcctgaagccatcaactttggctccttcaccatcaagtcagacgtctggtcctttggtatcctgctgatggagatcgtcacctacggccggatcccttacccagggatgtcaaaccctgaagtgatccgagctctggagcgtggataccggatgcctcgcccagagaactgcccagaggagctctacaacatcatgatgcgctgctggaaaaaccgtccggaggagcggccgaccttcgaatacatccagagtgtgctggatgacttctacacggccacagagagccagtaccaacagcagccatgatagggaggaccagggcagggcagggggtgcccaggtggtggctcgaaggtggctccagcaccatccgccagggcccacacccccttcctactcccagacacccaccctcgcttcagccacagtttcctcatctgtccagtgggtaggttggactggaaaatctctttttgactcttgcaatccacaatctgacattctcaggaagcccccaagttgatatttctatttcctggaatggttggattttagttacagctgtgatttggaagggaaactttcaaaatagtgaaatgaatatttaaataaaagatataaatgcaagtcttacg

SEQ ID NO: 107 - DNA, 814 bp, Homo sapiens
agaatcccggacagccctgctccctgcagccaggtgtagtttcgggagccactggggccaaagtgagagtccagcggtcttccagcgcttgggccacggcggcggccctgggagcagaggtggagcgaccccattacgctaaagatgaaaggctggggttggctggccctgcttctgggggccctgctgggaaccgcctgggctcggaggagccaggatctccactgtggagcatgcagggctctggtggatgaactagaatgggaaattgcccaggtggaccccaagaagaccattcagatgggatctttccggatcaatccagatggcagccagtcagtggtggaggtgccttatgcccgctcagaggcccacctcacagagctgctggaggagatatgtgaccggatgaaggagtatggggaacagattgatccttccacccatcgcaagaactacgtacgtgtagtgggccggaatggagaatccagtgaactggacctacaaggcatccgaatcgactcagatattagcggcaccctcaagtttgcgtgtgagagcattgtggaggaatacgaggatgaactcattgaattcttttcccgagaggctgacaatgttaaagacaaactttgcagtaagcgaacagatctttgtgaccatgccctgcacatatcgcatgatgagctatgaaccactggagcagcccacactggcttgatggatcacccccaggaggggaaaatggtggcaatgccttttatatattatgtttttactgaaattaactgaaaaaatatgaaaccaaaagtac

SEQ ID NO: 108 - DNA, 1110 bp, Homo sapiens
cctgagaagggtctagcggacgcaggtcaccagctgggcaacattcagaaagttagtcttcctatgctcattttcctgggctgttacagaagaagactggaagaggtaatttccaaggttcttcccagctctgaagttgtgtgtcaaagcgcgcagggaccatgtcggcggagaccgcgagcggccccacagaggaccaggtggaaatcctggagtacaacttcaacaaggtcgacaagcacccggattccaccacgctgtgcctcatcgcggccgaggcaggcctttccgaggaggagacccagaaatggtttaagcagcgcctggcaaagtggcggcgctcagaaggcctgccctcagagtgcagatccgtcacagactaaggagatggcaggcattgacagcttcactccatgaaggccatctctgtttctctcctccgcttaaccaagctgttgtggtttttcagcatagtgttgtatgttccattgctagctgtcctgctgtttaacacagtgttgtattttttttctaaatgtacataattagaaaagaaaataacaataggaagctatgtgtatcttctgtgtaaagcagtggcttcactggaaaaatggtgtggctagcatttccctttgagtcatgatgacagatggtgtgaaaaccatctaagtttgcttttgaccatcacctcccagtagcaatttgctttcataatccatttagcaatccaggcctctgttgaaaagataatatgagggagaagggaacacatttccttctgaacttacttccctaagtcactttccttatgtatcatctaatacaatgatggttgagtgaaaatacagaaggggtgtttgagtattcagatttcataaaacacttccttggaatatagctgcattaacttggaaagaagcctgttgggccagaagacagaaactccaactggcaaaaaagcaagcaatctaagaaaaaaaaccaccaaagttcttgaatttactatatttaaatgcattggttaagtttattttgctaaataaagtgaactgctttttgtctctaaaatgatattctaaataaaaccttaactttttgttgaaaaaa

SEQ ID NO: 109 - DNA, 5640 bp, Homo sapiens
agcatcctgaggttagcattacacttctcccagtggagcccatgacttctgatcaggacgctaaggttgtggctgaaccgcagacgcagagagtccaggagggcaaggacagcgctcatctgatgaatggtcctatatctcaaaccacttctcagacaagttccatcccacctttgagtcaggtaccagcaactaaggtttcagagctgaaccctaatgcagaagtgtggggggctcctgtgttacatctggaagcaagcagtgctgctgacggtgtgagtgctgcatgggaggaggtggctggccaccacgcagaccgtggcccgcagggatcggatgccaatggtgatggtgaccagggccatgagaatgccgcattgccagacccgcaggagtcggacccagcagacatgaacgctctcgctctgggtccctcagaatatgactctctgcctgaaaatagcgagacaggaggaaatgagtctcaaccagacagccaggaagacccccgagaagtacttaaaaaaacattggaattctgcttatctagggagaaccttgctagtgacatgtatcttatatcacagatggatagtgaccagtatgtgccaatcacaacggtggctaacctcgaccacatcaagaagctcagcactgatgtggacttgattgtggaagtgctaagatctttacctttagtccaagtggatgaaaagggagaaaaagtaaggccaaatcaaaatcgctgcatagtaatattgcgtgaaatatctgaatctacccccgtggaagaagtagaagcactatttaaaggagataatttaccaaaatttataaactgtgaatttgcatataatgataattggtttattacatttgaaacagaagctgatgcacaacaggcttacaaataccttcgagaagaagtcaaaacttttcaaggaaaaccaattaaggcacggataaaagcaaaggcaatagctataaacacatttttgccaaagaatggatttagacccctggacgtgagcctgtatgcccagcagcgctacgcgacgtcgttctacttccctcccatgtacagcccccagcagcagttccccctgtacagcctgatcactccccagacgtggtcagcaacgcacagctatcttgacccacccttggtaactccatttccaaatactggatttataaatgggtttacgtctccagcgttcaagcctgcggcgtctcctctgacttctctcagacagtatcctcctcgaagcaggaatcctagtaaatctcatctgcggcatgcgattcctagtgcagagaggggacctgggttattagaaagtccttcaatatttaacttcactgcagatcgattaattaatggtgtccggagtccacaaacaaggcaagcaggtcaaactagaacacggattcaaaacccttcagcatatgccaagagagaggctgggcctgggcgtgtggagccaggcagtctcgaatcctctcctggtttagggaggggaaggaagaattcctttggctaccggaagaaaagggaggagaagtttacaagcagccagacacagtctccaacgccaccaaagcctccgtcgccaagcttcgagctggggctgtccagcttccctccattacctggagctgccggcaatttgaagacagaggacttgtttgaaaacaggctatctagcttgataataggaccatccaaagaaaggaccctcagtgcagacgcaagcgtgaacacccttcctgtagtggtctccagagagccctcggtgccggcttcttgtgctgtatcagcaacgtacgagcgatccccctccccagctcatttacccgatgatcccaaggtggcggagaaacagagggaaacccacagtgtggacagacttccttccgccctcactgcgaccgcgtgtaaatcggtgcaggtgaacggagccgccacggaattgcgaaagcccagctacgcagagatttgtcagagaacgagtaaagagcctccttcttccccattgcaaccccaaaaagaacaaaagccaaacactgttggttgtgggaaggaggaaaagaagctggcagagcccgcagagagataccgggagcccccagccctcaagtccacacctggagcccccagagaccagaggcggccggcggggggccggccctcgccctcggccatggggaagcgtctcagccgagagcagagcactccccccaagtctcctcagtgaaaaccgtacgtctgggaggggtcgcagagcgctgtgttaaccacaaacgagacactctcccactcagtgcgagggcgagccgctggttaggagcttgcagtgtctgaggcctgtgggatcctcaagttggttttcttctgtgagttggattctccccctcttgaaaaaaaatcgatttttcaggatttaattaatacaaaccttattttaggttggtgcttaactggaggtgatgcataagtctgatttttttttccaagatagaaaaagcatttatcctaacaaattggtattttttattaagcctccatgtggctctgaatgcaagctatatatagtgagtttttctaaattaagggaactctgctttttttttttttttttaagtaactggtctgtaagtgcatatctctagaacgtccccgcagatgaatgagggccagtggccttggcagaggcaggtgtggcctcgtagaggcagtgctggccgcgccagggcatcagtgctgatgtgggagctgtgcttccacctaagccgttggtaggggactgtggcatttaagaatgtagagagcgcatcctttttgatctcctgggcggagtgaacctgcaggggccaccccagaaaccttggttctgatgcactgcaagcaagtaaccagcttctcactccagtttcaagtggctattatgtaatataaattcaaagcacattgtgaatagaacctacatgaaaacatacactttgttgcccactgacatgttaccagaagttgtaccatgatgttgttttgacccctgtgagctgatggccccggccctgctctgtgcacatttctgtccgtgttccccagcactctggttggagagagtccacatcttcagctccgtgtggacatctccctgtacctctgcatcagcacatggatttaagagttatgtaatcgtgagagaatggtgtttgtggtttttccccctctttggctggtggaggataaagttcctgctcttttacctccaagacgagggcctcattgattcacttccagaagtgctgcacttctgaagaacaaggatgcactaaagttagcaagtttataataaagttaaatataaattattttgttttaaaatgcctcaaatttttctttattctaagcagcaaacattaaaataagaatatttcctgctaaatgtaaccatacactttattccacaaaatgttatttaacaagactgagggttttttttaagaaaaaattatttccatccaatatttaaagacttgaattttatttaaacttgaaaatgactttgccttaacttttgtataagacagcttagagtccatggagcccggccctgggttggcgtgagtgggtcagagttactcagttactgcgtggatctcctgtcgctagttttactgagtaagcatactgtagtacaagagctagtagtagtttttgtaatataccttaaagatcttcaacagttgatcttttttcagaatgttggaaaatcctgtaaatgcaaatagtcaatactgtattaaatacgtgcacttggagtgtgcttcgcttgtacagttgtaaataatcagaacatatgaaaaaggtaccctacagagaaaattctgatacagattattgatatattataaatgttgctgttgagcgggatgtagataaactaaatgttgtggtttgaatattattttgatttgttgagattttcttttttctcttacatcggtgtgttgaactgattctgcctctttgctgcaaaagggaattggaaagtcttattaaaagcctccagatgttttcatactcttttaaaatgtatgtaaatgcatactaatcatatctaatgtgaaagagttttaaagtatatagagagcaaaaactggcaggatcgtaagtgaaggtgactagtaatctaatttaaatcacctgcagctaagcatgattgaccctgccagaggaaaacatgcctatttgaccatttcctttaaagcagttgccattattcaaatacagagaaatagccacagggctagtgtttttcaaatgcattttaaagaacatggggatttttttttgtagttgtcagttcactgaccaaaaaaaaaaaaaaaatcagaaataattgatctgtgaaacccaaactctcaatactcagaaagctgggaggcaacctcgaggcctgggcctacgagctgcatcttcgctacggaagggccagggcgccatcagccattcccaaaacacaaggcctgcccgtccgccagtgagtccttggtttttaataatgagaagtcctttcccccaaggtgtgagcattgcagcgcagtgtgtgtgtgtggttagagccagcttagtccttcactttgtcgaccgaagtgggagctcaacagctgcatgaggagggcagcgcgtgcattagccagtcgccactggagggctctgctgccctccggtcaatacactgtagttactgcctagccagcagcagtcttctgcatcaagaactgaaaccttgctcggaggtgatttttatagcatcctttttaattaaaggtgaaatacagattgctatataatgtctgaaaaaacctgatactacttcaagagtttctgctcagaagaaaatgagagttatcataataggaagctgtggcggtccatgccaactgtgctgtgtcacatacagcgatgagagtggctttcatactttttttttttttaagttaacaccctcctttacccccagcagtatctcaggttatagaatcagagatgcagcagtgacaaatggcattttaacttgtaaaatcgtgtgatgatgcttatcattttgaaatagaagaataaaaacctggtcccgtttcaccagacatgaatttcaagtggagtcgtcgttctctgagagtgagtgtcttgacattttcacccaggccctcctgtcatcacatcaccggctgtcactggcgggtggccgtaaacgtcctgcgttgctatattaggatctctgcagttcaggcttcaaaaccagttcagtgtatccgggcgacgggtagtggtggtgcatgcctgtctgtgtgccccgctggcgagctgtagttgcggcttgcgtgcctcgcggcccactacagggctgcagacaatcgaggcgagggcgctggccgccagcagctcacagcgcgggggtcatgtggtcgctcctcgagggtttcgtttttgttctgcttcattaagactggaatcaagcttacatgtaaactattggtaatttaagtttccttttgtgtcattcagtgtaaaactgtctaatttgaaaaaaaatgtaggttatgaaaataaagatttaggcactgttc

SEQ ID NO: 110 - DNA, 1349 bp, Homo sapiens
gagcactggaggccacccagtcatgggggacaccttcatccgtcacatcgccctgctgggctttgagaagcgcttcgtacccagccagcactatgtgtacatgttcctggtgaaatggcaggacctgtcggagaaggtggtctaccggcgcttcaccgagatctacgagttccataaaaccttaaaagaaatgttccctattgaggcaggggcgatcaatccagagaacaggatcatcccccacctcccagctcccaagtggtttgacgggcagcgggccgccgagaaccgccagggcacacttaccgagtactgcagcacgctcatgagcctgcccaccaagatctcccgctgtccccacctcctcgacttcttcaaggtgcgccctgatgacctcaagctccccacggacaaccagacaaaaaagccagagacatacttgatgcccaaagatggcaagagtaccgcgacagacatcaccggccccatcatcctgcagacgtaccgcgccattgccgactacgagaagacctcgggctccgagatggctctgtccacgggggacgtggtggaggtcgtggagaagagcgagagcggttggtggttctgtcagatgaaagcaaagcgaggctggatcccagcatccttcctcgagcccctggacagtcctgacgagacggaagaccctgagcccaactatgcaggtgagccatacgtcgccatcaaggcctacactgctgtggagggggacgaggtgtccctgctcgagggtgaagctgttgaggtcattcacaagctcctggacggctggtgggtcatcaggaaagacgacgtcacaggctactttccgtccatgtacctgcaaaagtcggggcaagacgtgtcccaggcccaacgccagatcaagcggggggcgccgccccgcaggtcgtccatccgcaacgcgcacagcatccatcagcggtcgcggaagcgcctcagccaggacgcctatcgccgcaacagcgtccgttttctgcagcagcgacgccgccaggcgcggccgggaccgcagagccccgggagcccgctcgaggaggagcggcagacgcagcgctctaaaccgcagccggcggtgcccccgcggccgagcgccgacctcatcctgaaccgctgcagcgagagcaccaagcggaagctggcgtctgccgtctgaggctggagcgcagtccccagctagcgtctcggcccttgccgccccgtgcctgtacatacgtgttctatagagcctggcgtctggacgccgagggcagccccgacccctgtccagcgcggctcccgccaccctcaataaatgttgcttggagtgg

SEQ ID NO: 111 - DNA, 3424 bp, Homo sapiens
caaagaggaaaacatggcggaaaacaaaggcggcggcgaggctgagagcggcggcgggggcagcggcagcgcgccggtaactgccggggccgccgggcccgccgcgcaggaggcggagccgcctctcaccgcggtgctggtggaggaggaggaggaggaaggcggcagggccggcgctgagggcggcgcggccgggcccgacgacgggggggtggccgcggcctcctcgggctcggcccaggctgcttcatctcctgcggcctcagtgggcactggagttgccgggggcgcagtatcgacgccggctccagctccagcctcggctcccgctccgggtccctcggcagggccgcctcctggaccgccagcctcgctcctggacacctgcgccgtgtgtcagcagagcttgcagagccggcgtgaggcggagcccaagctgctgccctgtcttcactccttctgcctgcgctgcctgcccgagccggagcgccagctcagcgtgcccatcccggggggcagcaacggcgacatccagcaagttggtgtaatacggtgcccagtatgccgccaagaatgcagacagatagaccttgtggataattattttgtgaaagacacatctgaagctcctagcagttctgatgaaaaatcagaacaggtatgtactagttgtgaagacaatgcaagtgcagttggcttttgtgtagaatgtggagagtggctatgtaagacatgtatcgaagcacatcaaagagtaaaatttactaaagatcacttgatcaggaagaaagaagatgtctcagagtctgttggagcatctggtcaacgccctgttttctgccctgtacacaaacaagaacagttgaaacttttctgtgaaacatgtgatagattgacatgtagagactgtcagctattggaacacaaagaacataggtatcagtttttggaagaagcttttcaaaatcagaagggtgcaattgagaatctactggcgaaacttcttgagaagaagaattatgttcattttgcagctactcaggtgcagaataggataaaagaagtaaatgagactaacaaacgagtagaacaggaaattaaagtggccattttcacccttatcaatgaaattaataagaaaggaaaatctctcttacagcagctagagaatgttacaaaggaaagacagatgaagttactacagcagcagaatgacatcacaggcctttcccggcaggtgaagcatgttatgaacttcacaaattgggcaattgcaagtggcagcagcacagcactactatacagcaagcgactgattactttccagttgcgtcatattttgaaagcacggtgtgatcctgtccctgctgctaatggagcaatacgtttccattgtgatcccaccttctgggcaaagaatgtagtcaatttaggtaatctagtaatagagagtaaaccagctcctggttatactcctaatgttgtagttgggcaagttcctccagggacaaaccacattagtaaaacccctggacagattaacttagcacagcttcgactccagcacatgcaacaacaagtatatgcacagaaacatcagcagttgcaacagatgaggatgcagcaaccaccagcacctgtaccaactacaacaacaacaacacaacagcatcctagacaagcagcccctcagatgttacaacaacagcctcctcgattgatcagtgtgcaaacaatgcaaagaggcaacatgaactgtggagcttttcaagcccatcagatgagactggctcagaatgctgccagaataccagggatacccaggcacagcggccctcaatattccatgatgcagccacacctccaaagacaacactcaaacccagggcatgctggaccctttcccgtagtatcggtacacaacaccacaatcaacccaacgagccctactacagcaactatggcaaatgcaaaccgaggtcccaccagcccatctgttacagcaatagagctaatcccctcagttaccaatccagaaaaccttccatcgctgccagatattccacccatacagttggaagatgctggctcaagtagtttagataatctactaagtagatacatctcaggcagtcacctacccccacagcctacaagcaccatgaatccttctccaggtccctctgccctttctccgggatcatcaggtttatccaattctcacacacctgtgagacccccaagtacttctagtactggcagtcgaggcagctgtgggtcatcaggaagaactgctgagaagacaagtcttagtttcaaatctgatcaggtgaaggtcaagcaagaacctgggactgaagatgaaatatgtagcttttcaggaggtgtaaaacaagaaaaaacagaggatggcaggaggagtgcttgcatgttgagcagtcctgagagtagcttgacaccacctctctcaaccaacctgcatctagaaagtgaattggatgcattggcaagcctggaaaaccatgtgaaaactgaacctgcagatatgaatgaaagctgcaaacagtcagggctcagcagccttgttaatggaaagtccccaattcgaagcctcatgcacaggtcggcaaggattggaggagatggcaacaataaagatgatgacccaaatgaagactggtgtgctgtctgccaaaacggaggagatctcttgtgctgcgaaaaatgtccaaaggtctttcatctaacttgtcatgttccaacactacttagctttccaagtggggactggatatgcacattttgtagagatattggaaagccagaagttgaatatgattgtgataatttgcaacatagtaagaaggggaaaactgcgcaggggttaagccccgtggaccaaaggaaatgtgaacgtcttctgctttacctctattgccatgaattaagtattgaattccaggagcctgttcctgcttcgataccaaactactataaaattataaagaaaccaatggatttatccaccgtgaaaaagaagcttcagaaaaaacattcccaacactaccaaatcccggatgactttgtggccgatgtccgtttgatcttcaagaactgtgaaaggtttaatgaaatgatgaaagttgttcaagtttatgcagacacacaagagattaatttgaaggctgattcagaagtagctcaggcagggaaagcagttgcattgtactttgaagataaactcacagagatctactcagacaggaccttcgcacctttgccagagtttgagcaggaagaggatgatggtgaggtaactgaggactctgatgaagactttatacagccccgcagaaaacgcctaaagtcagatgagagaccagtacatataaagtaaaatgacatggatttaaatcaattgttt

SEQ ID NO: 112 - DNA, 1199 bp, Homo sapiens
cattcgagcgacctcggaccacaatgccagcatggactttgcagaccttccagctctgtttggggctaccttgagccaggagggcctccaggggttccttgtggaggctcacccagacaatgcctgcagccccattgccccaccacccccagccccggtcaatgggtcagtctttattgcgctgcttcgaagattcgactgcaactttgacctcaaggtcctaaatgcccagaaggctggatatggtgccgctgtagtacacaatgtgaattccaatgaacttctgaacatggtgtggaatagtgaggaaatccagcagcagatctggatcccgtctgtatttattggggagagaagctccgagtacctgcgtgccctctttgtctacgagaagggggctcgggtgcttctggttccagacaataccttccccttgggctattacctcatccctttcacagggattgtgggactgctggttttggccatgggagcagtaatgatagctcgttgtatccagcaccggaaacggctccagcggaatcgacttaccaaagagcaactgaaacagattcctacacatgactatcagaaggaccagtatgatgtctgtgccatttgcctggatgaatatgaggatggggacaagctgcgggtactcccctgtgctcatgcctaccacagccgctgcgtggacccctggctcactcagacccggaagacctgccccatttgcaagcagcctgttcatcggggtcctggggacgaagaccaagaggaagaaactcaagggcaagaggagggtgatgaaggggagccaagggaccaccctgcctcagaaaggaccccacttttgggttctagccccactcttcccacctcctttggttccttagccccagctccccttgtttttcctgggccttcaacagatcccccactgtcccctccctcttcccctgttatcctggtttaataaccccccacacatacacctctggtgacctatttgcacagaccgtcgtcttccctccagtcttctgagggataggggacattccatcccaagcttctcccttacccacacctatccttttgaggggctttggggtggggctggggcaagcagagggactgggtcttcacttcttgggctaataaaattgtttctttgtggaccaaaaaaaaaaaaaaaaaaa

SEQ ID NO: 113 - DNA, 4398 bp, Homo sapiens
ggccaaaggtcaagatacttctctgggaaatgttgctgctgatgctgctttacaaagtcatacaatgagtgtttggtttaagaaagattttcatacttaaaagattttcatcttggaaatacatcaagtgaaaattaaattcttttgggaaacattttccttctgatatattatacttgtaatgggcgacatggcaaacaactcagttgcttacagtggtgtgaaaaactctttgaaggaagctaatcatgatggagactttggaattacgctcgcagagctgcgggctctcatggagctcaggtccacagatgcattacgaaaaatacaggaaagctatggagatgtctatggaatttgcaccaaattgaaaacatctcccaatgaaggtttaagtggaaaccctgcagatttagaaagaagagaagcagtgtttggaaagaattttatacctcctaaaaagccaaaaacctttcttcaattagtatgggaagcattacaagatgtcactttaattatattagaaattgcagccatagtatcattgggcctttctttttatcagcctccagaaggggataatgcactttgtggagaagtttctgttggggaggaagaaggtgaaggtgaaactgggtggattgaaggagctgcaatcctcttgtctgtagtgtgtgtggtgttagtaacagctttcaatgactggagtaaggagaaacagtttagaggtttgcagagccgaattgaacaagaacagaagttcactgtcatcaggggtggtcaggtcattcagatacctgtagctgacattactgttggagatattgctcaagtgaaatatggtgatcttcttccagctgacggcatacttattcaaggcaacgatcttaaaattgatgaaagctcattgactggtgaatcagatcatgttaaaaagtctttagataaggatcccttacttctatcaggtactcatgtaagggaaggctctggaagaatggtagttacagctgtaggtgtaaattctcaaactggaattatctttaccttacttggagctggaggtgaagaggaagagaagaaagatgagaagaaaaaggaaaagaaaaataagaaacaagatggagctattgagaatcgcaacaaagcaaaagcccaggatggtgcagccatggaaatgcagccattgaagagtgaagaaggtggagatggtgatgaaaaagataaaaagaaagcaaatttgccaaaaaaggaaaaatctgttttacaagggaaacttacaaaactggctgttcagattggcaaagcaggtctgttgatgtctgccatcacagttatcattctagtattatattttgtcattgacaccttctgggttcagaaaagaccatggcttgctgagtgcacaccaatttatatacaatactttgtgaagttcttcattattggagttacagttttagtggtcgcagtgccagaaggtcttccacttgcagtcacgatctcactggcttattcagtcaaaaaaatgatgaaagataataacttagtaaggcatctggatgcttgtgaaaccatgggaaatgctacagctatttgttcagataaaacaggaactttgacaatgaacagaatgacagtcgttcaagcttacataaatgaaaaacattataaaaaggttcctgaaccagaagctattccaccaaatattttgtcctatcttgtaacaggaatttctgtgaattgtgcttatacatcaaaaatattgccaccagagaaagagggtggattacctcgtcacgttggtaataaaactgaatgtgccttgttgggacttcttttggatttaaaacgggattatcaggatgttagaaatgaaataccagaagaagcactgtacaaagtctacaccttcaattctgttaggaagtccatgagtactgtcctgaaaaattcagatggaagttatcgaatattcagcaagggtgcatctgagataattctgaaaaagtgtttcaaaatcttgagtgctaatggtgaggcaaaagtattcagaccaagggaccgtgatgatattgtaaaaactgtgattgaaccgatggcatcagaaggcttgagaaccatatgtcttgcattcagagattttccagcaggagaaccagaaccagagtgggataatgaaaatgatattgtcaccggccttacatgcattgctgttgtggggattgaagatcctgtgagacctgaggtgccagatgcaattaaaaagtgtcagagggctggaattactgtgcggatggtcactggtgataatattaatactgctcgggccattgctaccaaatgtggtattttacatcctggggaagattttctgtgcctagaaggtaaagattttaacagaagaatacgaaatgaaaaaggagagattgagcaagagaggatagacaagatttggccaaaacttcgagtacttgcaagatcatctcctactgataagcatacactggttaaaggtataattgacagcactgtctcagaccaacgccaggttgtagctgtaactggtgatggtacaaatgatggcccagcactaaagaaagcagatgttggatttgcaatgggtattgctggaactgatgtagctaaagaagcatccgatattattctcacagatgacaactttacaagcattgttaaagcagttatgtggggacgaaatgtctatgacagcatctcaaaattccttcagttccaacttactgttaatgtagtagcagtgattgttgcttttacgggcgcctgcattactcaagactcaccgcttaaggctgtgcagatgctgtgggtaaacctcataatggatacactcgcttccctggctctggcaacggaaccacccactgagtctctcttgcttcggaaaccttatggtagaaataagcctctcatctcacgtacaatgatgaagaatattttgggtcatgcattctatcaacttgtagtagtctttacactcttatttgctggagaaaagttttttgacattgatagtggaagaaatgctcctttgcatgctcctccttcagaacattatactattgtttttaatacctttgtgctgatgcaacttttcaacgaaataaatgcccggaaaattcatggtgaaagaaatgtattcgaaggaatctttaacaatgccatcttctgcacaattgttttaggcacttttgtggtacagataataattgtgcagtttggtggaaaacctttcagttgttcagaactttcaatagaacagtggctatggtcaatattcctaggaatgggaacattactctggggccagcttatttcaacaattccaactagccgtttaaaattcctcaaagaagctggtcatggaacacaaaaggaagaaatacctgaggaggaattagcagaggatgttgaagagattgatcacgctgaaagggagttgcggcgtggccaaatcttgtggtttagaggtctgaacagaatccaaacacagattcgagtggtgaatgcatttcgtagttctttatatgaagggttagaaaaaccggaatcaagaagttcgattcacaactttatgacacatcctgagtttaggatagaagattcagagcctcatatcccccttattgatgacactgatgccgaagatgatgctcctacaaaacgtaactccagtcctccaccctctcccaacaaaaataacaatgctgttgacagtggaattcaccttacaatagaaatgaacaagtctgctacctcttcatccccaggaagcccactacatagtttggaaacatcactctgattgtaagctgaatgttaacacactagctgcattgtaaagaaacaaattgaaactgggtcttttcacatattgtgatggacaagctagtattcttgtctttggacttcaacagaagacacacttgtacgaatgtagatttatttttttaaaaaaaaaaaagcaaagctttctgccagactgagggtgctttttggggggtgggagaaatgaactgacagataaacagtaactcagcgtaagtgacctgtggatcatcagtagtacccaagcatggtcctgaacagtgtattagcagagctttagtttatctcagtcctggatgggagagagagggaggagtaaaactgggcaagacaaagagccctggatcgttgaattgatagtttaatttctgctgttggctgttaataatttggattatttatgtttataaatgatacagatctgtttacaaggtttgtagatactttttttgttcctgttcatagatgggaagcttccttataactgatgcagagaaaaattagtccttcaaatactgctgtattttcagg

SEQ ID NO: 114 - DNA, 905 bp, Homo sapiens
caacacaggggcagtctccaggacctccacaccattaacaagatgagccttgtgctcccttgggctctagagaggaagcccctctgagccctcagcccctctttcctccctctcctaaagtaatttgatcctcaggaatttgttctgccctcatctggccctggccagctctgcatttgacaaatgccaggaagaggaaactgttgagaaaacggaactactggggaaagggagggctcactgagaaccatcccggtaacccgaccgccgctggtcaccatgaaccacattgtgcaaaccttctctcctgtcaacagcggccagcctcccaactacgagatgctcaaggaggagcaggaagtggctatgctgggggggccccacaaccctgctcccccgacgtccaccgtgatccacatccgcagcgagacctccgtgcctgaccatgtcgtctggtccctgttcaacaccctcttcatgaacacctgctgcctgggcttcatagcattcgcctactccgtgaagtctagggacaggaagatggttggcgacgtgaccggggcccaggcctatgcctccaccgccaagtgcctgaacatctgggccctgattttgggcatcttcatgaccattctgctcgtcatcatcccagtgttggtcgtccaggcccagcgatagatcaggaggcatcattgaggccaggagctctgcccgtgacctgtatcccacgtactctatcttccattcctcgccctgcccccagaggccaggagctctgcccttgacctgtattccacttactccaccttccattcctcgccctgtccccacagccgagtcctgcatcagccctttatcctcacacgcttttctacaatggcattcaataaagtgtatatgtttct

SEQ ID NO: 115 - DNA, 1670 bp, Homo sapiens
attgagagtggctctaacaagtgccatttttccttgttagctttcatttctcagccctttacaagattaaaatagtctgcagtttaatctctccaaagctttacggacagtgattctgtcctaaacaagacagtgactccaggatttctgaagactattgtggaagaagcatccattaaggccaagctataacatcagaaatggtgaatgaatacaagaaaattcttttgctgaaaggatttgagctcatggatgattatcattttacatcaattaagtccttactggcctatgatttaggactaactacaaaaatgcaagaggaatacaacagaattaagattacagatttgatggaaaaaaagttccaaggcgttgcctgtctagacaaactaatagaacttgccaaagatatgccatcacttaaaaaccttgttaacaatcttcgaaaagagaagtcaaaagttgctaagaaaattaaaacacaagaaaaagctccagtgaaaaaaataaaccaggaagaagtgggtcttgcggcacctgcacccaccgcaagaaacaaactgacatcggaagcaagagggaggattcctgtagctcagaaaagaaaaactccaaacaaagaaaagactgaagccaaaaggaataaggtgtcccaagagcagagtaagcccccaggtccctcaggagccagcacatctgcagctgtggatcatcccccactaccccagacctcatcatcaactccatccaacacttcgtttactccgaatcaggaaacccaggcccaacggcaggtggatgcaagaagaaatgttccccaaaacgacccagtgacagtggtggtactgaaagcaacagcgccatttaaatacgagtccccagaaaatgggaaaagcacaatgtttcatgctacagtggccagtaagactcaatatttccatgtgaaagtcttcgacatcaacttgaaagagaaatttgtaaggaagaaggtcattaccatatctgattactctgaatgtaaaggagtaatggaaataaaggaagcatcatctgtgtctgactttaatcaaaattttgaggtcccaaacagaattatcgaaatagcaaataaaactcccaagatcagtcaactttacaagcaagcatctggaacaatggtgtatgggttgtttatgttacaaaagaaaagcgtacacaagaagaacacaatttatgaaatacaggataatacaggatccatggatgtagtggggagtggaaaatggcacaatatcaagtgtgagaaaggagataaacttcgactcttctgccttcaactgagaacagttgaccgcaagctgaaactggtgtgtggaagtcacagcttcatcaaggtcatcaaggccaagaaaaacaaggaaggaccaatgaatgttaattgaaatatgaaagctgaaatgcaacaaacaacttccgcttaaaacaattaagttgttaataactgtgattttgtaaatttcagtaattcatttaaatgatgtttcagtagatatattctagcatattaagagcttttataactgagttatagattagtttgctttctggaataaaattttcttcttatactcttccttttttttagatattacattttgcttttatgacattcacgaggcaaaaaaccg

SEQ ID NO: 116 - DNA, 1666 bp, Homo sapiens
atttgctttctctttttcctttcttccggatgagaggctaagccataatagaaagaatggagaattattgattgaccgtctttattctgtgggctctgattctccaatgggaataccaagggatggttttccatactggaacccaaaggtaaagacactcaaggacagacatttttggcagagcatagatgaaaatggcaagttccctggctttccttctgctcaactttcatgtctccctcctcttggtccagctgctcactccttgctcagctcagttttctgtgcttggaccctctgggcccatcctggccatggtgggtgaagacgctgatctgccctgtcacctgttcccgaccatgagtgcagagaccatggagctgaagtgggtaagttccagcctaaggcaggtggtgaacgtgtatgcagatggaaaggaagtggaagacaggcagagtgcaccgtatcgagggagaacttcgattctgcgggatggcatcactgcagggaaggctgctctccgaatacacaacgtcacagcctctgacagtggaaagtacttgtgttatttccaagatggtgacttctatgaaaaagccctggtggagctgaaggttgcagcactgggttctaatcttcacgtcgaagtgaagggttatgaggatggagggatccatctggagtgcaggtccaccggctggtacccccaaccccaaatacagtggagcaacgccaagggagagaacatcccagctgtggaagcacctgtggttgcagatggagtgggcctatatgaagtagcagcatctgtgatcatgagaggcggctccggggagggtgtatcctgcatcatcagaaattccctcctcggcctggaaaagacagccagcatttccatcgcagaccccttcttcaggagcgcccagccctggatcgcagccctggcagggaccctgcctatcttgctgctgcttctcgccggagccagttacttcttgtggagacaacagaaggaaataactgctctgtccagtgagatagaaagtgagcaagagatgaaagaaatgggatatgctgcaacagagcgggaaataagcctaagagagagcctccaggaggaactcaagaggaaaaaatccagtacttgactcgtggagaggagtcttcgtccgataccaataagtcagcctgatgctctaatggaaaaatggccctcttcaagcctggtgaggaaatgcttcagatgaggctccaccttgttaaataaattggatgtatggaaaaatagactgcagaaaaggggaactcatttagctcacgagtggtcgagtgaagattgaaaattaacctctgagggccagcacagcagctcatgcctgtaatcctagcactttggaaggctgaggagggcggatcacaaggtcaggagatcaagaccatcctggctaacacggtgaaaccccgtctctactaaaaatacaaaaaataaaaaattagccgggcatggtgacgggcacctgtagtcccagctactcgggaggctgaggcaggagaatggcatgaacccggaaggcagagcttgcagtgagccgagatcacgccactgcactccagcctgggagacagagcgagactctgtctcaagaaaaaaaaaaaaaaaaaaaaa

SEQ ID NO: 117 - DNA, 4174 bp, Homo sapiens
ctgcgagtcaggccgtgatggcggacgcctgggaagagattaggcggttggcggccgacttccagcgggcgcagttcgccgaggccacgcagaggttgtccgagcggaactgcattgagattgttaataaattgattgctcagaaacagctagaagtagttcatacactcgatggaaaggaatatattactccagcccaaattagtaaagaaatgagagatgagctacatgtccgaggtggtcgagtaaacattgttgatctacaacaggtaattaatgtggacctgattcatattgaaaatagaattggtgacattattaaatcagaaaagcatgttcagttagtgttgggacaactgatagatgagaattatttggatcggttggcagaagaggtcaatgataaattgcaagaaagtggtcaggtcaccatatcagaactgtgtaaaacttatgatcttcctgggaactttctgacacaggcactaactcagcgacttggtagaattatcagtggacatattgatcttgataatagaggagtaatttttacggaagcttttgtagctcgacataaagcacgtatccgtggactattcagtgctattacccggcctacagctgtgaattctttgatttcaaaatatggatttcaggagcagcttctttactctgtgcttgaggaacttgttaatagcggacgcttacgaggcactgtggttggtgggagacaggataaagctgtgtttgtccctgacatctactccaggacacagagtacttgggtggattcctttttcaggcagaatggctatctagaatttgatgctttgtccagacttggaatcccagatgctgtaagctacataaagaaaagatataagactacacaactcttgtttttgaaagcagcttgtgttggtcaaggacttgtggatcaagtggaagcatcagtagaagaagccatcagctctggaacatgggttgatattgcacctctgctacccacttctttatcagttgaagatgctgccatattgcttcagcaggtgatgagggcattcagcaaacaggcctcaactgtagtctttagcgacactgttgtagtcagtgaaaaatttataaatgactgtacagaactgttccgtgagctgatgcaccagaaagctgaaaaggaaatgaaaaataatcctgtgcatttaatcactgaagaagatctgaaacaaatctccactttagaaagcgttagtacaagtaaaaaggataaaaaagatgagcgaagaaggaaagcaacagagggcagtggaagcatgagaggaggaggtgggggcaatgccagagagtacaaaattaaaaaagtcaagaagaaaggaagaaaagatgatgatagtgatgatgaatctcaatcatcccacactggaaagaagaagccagagatcagttttatgttccaggatgagattgaagattttttaagaaaacacatacaagatgcccctgaggagtttatttcggaacttgctgagtacttaataaaacctcttaataaaacttatctcgaggtggtacgttcagtattcatgtcttcaacaacttctgcttctgggacgggcagaaaacgcacaatcaaggacttgcaagaagaagtttcaaacctgtacaataacattaggttatttgaaaaagggatgaagttttttgcagatgacacacaggctgctcttaccaaacacttgctgaagtcagtgtgtactgatatcactaacctcattttcaacttcttagcttcggatttaatgatggcagtagacgatcctgcagccattacaagtgaaataagaaagaaaattttaagtaaattatcagaagaaaccaaagtagctcttacaaaactccataactctctgaatgaaaagagcatagaagactttatttcttgtctggattctgcagcagaagcttgtgatattatggtgaaaaggggagacaaaaaaagggaaagacagatactgttccaacatcgacaagcactggctgaacagctaaaggtcacagaagaccctgctcttattctgcacctcacatcagtcctgttgtttcagttttcaacccacagcatgctccatgcacctggaagatgtgtcccacagatcattgcttttcttaatagtaaaattccagaggatcagcatgctcttttggtaaagtatcaaggtttggttgtaaagcagctagtcagtcaaagtaagaagactgggcagggagattatcccttgaataatgaattagacaaagaacaagaagatgttgccagtactactcgtaaagagcttcaagaactttcttcatccattaaagaccttgttctcaaatctaggaaatcatctgtgacggaagagtaatgatcttaatttacatttgtcatatagtaagcattttcccccaaggttgaaggtgagtggtcacaaaaaagtagtcactatacaactcccctctccctgcaaaaaccacctcatacacacacaattcagttaaaacagtagtattgtattaaatgtaaatcttaaaaagatgtgaatttttgtaaattgggttcttcatggaagtttttttccacctgattttcacacaaatactatatgaaatttttcacattattttcacataattttaaaaattacatatttcaggtttgttctctttccaaatgttgaatgaaaaacaaattttccaatccatttatccctggggaaggattcatttgttgcgagtgccagtatacttaaatgtatactttatatacatttaagcagaaatttaaaatgtggtcttttttttttaaaagaaacacttctgtgtcagaaatgaaaataaatcatgttttttatttttaaatagaaagcacttcaaaactaaaatacagaaatttacaaaaaagaaaaattattactaagcccttgctcttatttttggcagaataaacattgattttggttggggctgcaaggatgcctttacaggtgcacaagaacgctagagtggcccatgcattgctgtgttctcttctaaaacaagctactaacaagagagagaacacatgcaatttattaccagtaagcataagtcatatttaacattggaataactaagcattttatacaaagatttttctttgacccagtttgcatttgtacattttatttttttagttcaacagctgctctgtcacataatactttgtaaatactagtgtgaaaaacagataggatgccttttccagtggtaggagcatctgtaagtgcatttaaatcattagaagcttttttccaaaactagaaacccttattaaaaaatagacatttttttctaaagattattagttaaaaataactaaaagagttccttagagtaatcatttcaaccaaatgaatttcaagcaacaacttacttactatttatcaaaaagggatttaattattttgaatataattataaattaaatttcaaatatttaaaaatactattttatataattccttatgacattttaaactttatattttaaaatatttgaatacgaaaagatcagtctacctctactccattctagacaaagtattaatccttagtgaaagtaattaattaaattgccaacttggcattattattaaacttgataggaacgcaacattaaatttaaaaatgttttcccgtgggtaattttctattatatatattttcatatgggcaaagggaaaaaatgataaatcctctgtaatcacaaaccccaatttcgttttgtttattcagcttctaaaatattgaacacccagacttttaattcaacctttaagaaccttatcatttatgtttcagtagatatcaaagtaatccatgtttgtgtcaaatgatcatagaaaataaatagaagagacagtgaagcaagtaaaaagaaaagcattgttttaatttgtttgcattaatttttttcatttgtcaaaatgcttcttttgttgccacagtaaagaacagtttttattgttttgtaagtaaaattacgtagctgattttgtatgtaaagattaatttccataataaaaattattgtatgtttactgtgatcttaatgggcagggttaagaaagttatttaaaataaagttacctattctact

SEQ ID NO: 118 - DNA, 958 bp, Homo sapiens
cgtctcagctccagaaccgactccgctccgcactggccttggtcacaggtgcggggagcggcatcggccgagcggtcagtgtacgcctggccggagagggggccaccgtagctgcctgcgacctggaccgggcagcggcacaggagacggtgcggctgctgggcgggccagggagcaaggaggggccgccccgagggaaccatgctgccttccaggctgacgtgtctgaggccagggccgccaggtgcctgctggaacaagtgcaggcctgcttttctcgcccaccatctgtcgttgtgtcctgtgcgggcatcacccaggatgagtttctgctgcacatgtctagggatgactgggacaaagtcatagctgtcaacctcaagggcaccttcctagtcactcaggctgcagcacaagccctggtgtccaatggttgtcgtggttccatcatcaacatcagtagcatcgtaggaaaggtggggaacgtggggcagacaaactatgcagcatccaaggctggagtgattgggctgacccagaccgcagcccgggagcttggacgacatgggatcccctgtaactctgtcctcccagggttcattgcaacacccatgaccaagaaagtgccaaagaaagtggtggacaagattactgaaatgatcccgatgggacacttgggggaccctgaggatgtggcagatgtggtcgcattcttggcatctgaagatagtggatacatcacagggacctcagtggaagtcactggaggtcttttcatgtaactgcctcaaggaccctggactctgctcacccccccaccactctgcctggcctcctgctgatgaggactctaagttcccaggatacaaaaggggtggcagtgtatggttcaggaatgctgaatatgggaagcaggggtgcttgtgaccctaataaattccatatcctcttccctgcc

SEQ ID NO: 119 - DNA, 5871 bp, Homo sapiens
gcaccacagaccagtctgtcctggtgttggatgttaaaagtggagccacaaagaagccatcttatgtgggacaggcttgggtgtgagaccagagctgtgggtagcagcatgttgggtcaggatgaggggcagaggaaacactttccacctcttggatatggattttatcctgccctgattcaggagatccccatctattaagtaaggggaaagatgattttgttgtcttttgtttcagattctaatgtaggaactggtgagaagaaggtgactgaagcctggatttctgaggatgaaaactcacataggacgacgtcagacagactcacggtgatggagctcccctctcccgagtctgaggaagtccacgagcccagattaggggagctcttgggaaatccagaaggtcagagcctggggagttccccctctcaggacaggggctgcaagcaggtgacagtgacccattggaagatccagacaggagagacagctcaagtgtgcaccaagtcaggaagaaaccatattctgaactcagaccttcttctgcttcagagagagctcatagagggggaagccaatccttgcgatatctgtggcaaaaccttcacgtttaattcggacctagttaggcatcggatttcgcatgctggggagaaaccttacacgtgcgatcagtgtgggaaaggctttggccagagctcacaccttatggagcatcagagaattcacactggagagagactctacgtctgtaatgtgtgtgggaaagacttcattcactattcaggtctcattgagcatcagcgcgttcattcaggagaaaagcccttcaaatgtgcgcagtgtgggaaggcgttttgtcacagttcagacctgattaggcaccagagagttcacaccagagagagaccttttgaatgcaaagagtgtgggaaaggcttcagtcagagctccttacttattcgccatcagaggattcacacgggagaaaggccctatgagtgcaatgaatgtgggaaatccttcataaggagctcgagcctcattcgccattatcagatccacacagaagtgaaacagtatgaatgcaaagaatgtgggaaggcattccgtcatcgctcagaccttattgaacaccagagaattcacaccggagagagaccctttgaatgcaatgagtgtgggaaagcctttattcggagttcaaagctcattcagcatcagaggatccatactggggagaggccttacgtatgcaatgagtgtgggaagcgcttcagccagacgtcaaacttcacccagcatcagagaattcacactggagagaaactctatgaatgtaacgagtgtgggaaagctttctttctgagttcataccttattcgacaccagaaaatccacactggagagagagtgtatgaatgtaaggaatgtgggaaagcgtttctccagaaagcccatctcactgagcaccagaagatccactctggggacaggcccttcgaatgtaaagactgtgggaaagccttcatccagagctccaagctgcttctgcaccagattattcacactggagaaaagccctatgtgtgcagttattgtgggaaaggctttattcagaggtcaaacttccttcaacaccagaaaattcatactgaagagaagctctatgaatgtagtcagtatgggagagattttaactcaactacaaacgttaaaaataatcaaagggttcaccaagagggactctccttgagtaaggcccccatacatttgggtgagaggtctgtagataagggggaacacacaggtaacttataaaataattactttcccgcccagtgagtgatgtttggaaatgcgtggaattaggattcatgtggtttctaagatttggacatgtcagaattttgtgagtcatggatggggctgcttttgcagtgggtgccacctgccactgtgcagccctactcggctcagcccttctcctcagctgtgagcactgtcctcaggagagtcacagggcttgacacctgactctgagctggaacagtaggggcagggagaagacaggtctcaagaaaaggtttttaagaagtttcatccccagttaagcagagtccatccttgacttaaatcccttattacagcacaactgtgtatctaatcttacgatttaggagaatgttacctaggacattttgatgtgttaagttgaagaaaggtaactcgtgtatgaaccccgagccatttccctgttgtcctgaggaggaactccaggcctcccatcgtgtgccctaaggcctcctgcgtcctggagccctgcctcccactgcctgacttcctgccacacggttaatgctgcagcaacaccgactgcttcatcttccctgtgctccacgtggcttcctacctctctcgcctttgttcttgttgaagggtctcttctcagctaattaactctgaatcatggttcaagacaagcctcaggcatcatgtcaatgggtgtttccctcaagcttagttggcagcactctccacacttctgtggctcagtgattactgctattactatatttacttgcatatgtcagaatgatgtgatagactatctctgtcactatgctgttgggttcctgaggacagtgatcatatctgattgatttccatgtgtccactgtctagcacagggcaataaaaaatacacccctaaatctatgtgtaattggcatctctcttgctttgtcctttctatactgccattctaaaaattttcagctgttggctgtttttttttgttgtttgttcattttgtatcagtataatctacgattctgttagaagtatcttctcagccctgctactgtctgctgctcctacttagaagttgcaggcaatatcctgtgcacatccacgccctcctgtgtgccaccttacagctcatgcagaactgtctacttgatctggagggcattgacacctggctcagctggaacagtggggacaggaggaggcaggtctcaagagaaggtctttacttacttgtctgtatctttctgtctcactcgaaaggcacagtctcaatgcgctacgtaactcttctgttgtagcagttctgaggttgaactgagctcttgtcattttccatgctctctggctcattgtgtcatttcaaaatgtattgatatctataaggaatagtcctcaatgttgggaaaacagatgagcaacccactaccctgaagtcatccaccgtgtagtggggaagacggagatcacagtagggtgagttaagtatgtgccctcaggtgtgaaggagcacaggtgagggggtgcctgctgtggcacagagctgggaaggccttacagaagaggtgacatttcagctgggccagagatcagtagagagcagctgaagaagaaaatagggtccaggagaggaatctgcagaaacatggagccatgacagatggctttttggctaggactgttcgaaagcaggcgaggtaaatggacagtggacagccgcctcgccaaactgttagtctttacctctgaatttcatctggacatgaaccccaaagtccagttttgtaacgatataatttttttctcatgaggccatattttgagttcttaaatactaccaaccctgaacgtctcaggacaaataattcaaaaaagagatctacattttctggaaaatcagcattactagagatgtttcaaatgtagattttaccagaccattttaatcaactttattgagattcaattttcatatagtaaaacgcctatttaagtgtacaaggttttgaaaaatctatacacctgtgtaaccaccaccacctgtgtaaccaccaccgccagaaccaaaaacgtttctgtcacccaaagaagttcccttttgccttttcctagttaagcccactccagccccagataaccactttctatcctcatagattagtgttgcttggtttagagcctcatacaaatggattcatttactatgtgttcttttgcgtctgatgtctcactttggcatgtttttagactcatccaagctgttttgtgtttcagtagttctccttgctgaatagtattccattgtgtggataagccatcatttgtttattcatccacgtgttaatgggtttccagtctcggctcttaaaactatgagcatttgtgtaaaagtatgtatttgcacatgtgtttttatttctcttgggtaagtacctaggactttaattgctgtgttgtaagtgtcttagttcattcaggctgccataacaaaataccatcaactgggaggcttataaacaacagaaatttatgttttacagttctggaggctgggaagtccaagatgagggtgtcaacatttggtgtctagtgagggcctgcttccttttaagtagatgtctttttactgtgactgcacgtggtggaaagggactagcaagcttaccccattcatgagggctctccccttgtgattctgtcccctccccaagaccccacctcatatcatcttatgggttaggaatttgacatgaattgtgcaaggatgtaaacattcagtccattgcaatgcgtgtttctaacttcctaagaaattgtcacacagccctctgtagtggttgaatcattttacactattactacattatgggaagattccagttgctccatatctttgctaacacttggcattgtcagtctcttaaaatttaatccactctagcctccttatgattttaatttgtatttgcccactgaataatgtatgtctatgatttcatctgcttattgcttttccgtgtcgtcttttgtgatgtgtctgttcgtgccttttgcctgtttttaagttgggatgcttattgttgactcaagttctttccatattctgcatgaaaaacatacatgtaatatatagaattctttgtctccatttgtgacaaatattgtgaatattttcatgtttggtttgcctgttcattttcttaatggtgtcttttgaatattttttattaagccaccactcctggccaactgtagttgaactcaggtattggaagggcttccgttttgttcttttcccattttttttttttgacttctagatcctttgcattttcgtataaaatttgaagtcaacttctatcaacttcaggccaggcccgtggctcatgcctgtataatcccagcactttgggaggccgaggcgggcggatcgcttgaggtcaggagttcaagaccagcctggccggggtggtgaaaccccatctctactaaaaatgcggaagagttagccaggcgtggtggcaggcgcctgtagaatcccagctgctcgggaggctgaggcaggagaattgcttgagcctgggaggtggaggtttcagtgagctgggatcgtggcattgcactctagcctgggcaaccaagagtgaaactgtctcaaaaaacaacttttatcaatgtctgcaaaaagaaagtcttctgggatttatagatcaatttagggagaaatgacattttaacaattctgagttttccaattgttgaacatggtgtactgccccatttatttagatctgttaatttctctcagtttgcagctctcacattttgttaaattcatgtatttaatatttctgcatgctattgcaagtggtaaggttttcaaaaagctgttttctagttattgctagtatatagaaatgcattagacttgtacattgatcttgtatcaagcaacttagatcagttaacttattctagtagcttttttctagattctttagcattttctatgtagataatcatgtcatctgtgaataaagtattttacttttccaattt

SEQ ID NO: 120 - DNA, 2354 bp, Homo sapiens
gagtgcagtctacctgcagcacagcacactcctttgggcaaggacctgagacccttgtgctaagtcaagaggctcaatgggctgcagaagaactagagaaggaccaagcaaagccatgatatttccatggaaatgtcagagcacccagagggacttatggaacatcttcaagttgtgggggtggacaatgctctgttgtgatttcctggcacatcatggaaccgactgctggacttaccattattctgaaaaacccatgaactggcaaagggctagaagattctgccgagacaattacacagatttagttgccatacaaaacaaggcggaaattgagtatctggagaagactctgcctttcagtcgttcttactactggataggaatccggaagataggaggaatatggacgtgggtgggaaccaacaaatctcttactgaagaagcagagaactggggagatggtgagcccaacaacaagaagaacaaggaggactgcgtggagatctatatcaagagaaacaaagatgcaggcaaatggaacgatgacgcctgccacaaactaaaggcagccctctgttacacagcttcttgccagccctggtcatgcagtggccatggagaatgtgtagaaatcatcaataattacacctgcaactgtgatgtggggtactatgggccccagtgtcagcttgtgattcagtgtgagcctttggaggccccagagctgggtaccatggactgtactcaccctttgggaaacttcagcttcagctcacagtgtgccttcagctgctctgaaggaacaaacttaactgggattgaagaaaccacctgtggaccatttggaaactggtcatctccagaaccaacctgtcaagtgattcagtgtgagcctctatcagcaccagatttggggatcatgaactgtagccatcccctggccagcttcagctttacctctgcatgtaccttcatctgctcagaaggaactgagttaattgggaagaagaaaaccatttgtgaatcatctggaatctggtcaaatcctagtccaatatgtcaaaaattggacaaaagtttctcaatgattaaggagggtgattataaccccctcttcattccagtggcagtcatggttactgcattctctgggttggcatttatcatttggctggcaaggagattaaaaaaaggcaagaaatccaagagaagtatgaatgacccatattaaatcgcccttggtgaaagaaaattcttggaatactaaaaatcatgagatcctttaaatccttccatgaaacgttttgtgtggtggcacctcctacgtcaaacatgaagtgtgtttccttcagtgcatctgggaagatttctacccgaccaacagttccttcagcttccatttcgcccctcatttatccctcaacccccagcccacaggtgtttatacagctcagctttttgtcttttctgaggagaaacaaataagaccataaagggaaaggattcatgtggaatataaagatggctgactttgctctttcttgactcttgttttcagtttcaattcagtgctgtacttgatgacagacacttctaaatgaagtgcaaatttgatacatatgtgaatatggactcagttttcttgcagatcaaatttcacgtcgtcttctgtatactgtggaggtacactcctatagaaagttcaaaaagtctacgctctcctttctttctaactccagtgaagtaatggggtcctgctcaagttgaaagagtcctatttgcactgtagcctcgccgtctgtgaattggaccatcctatttaactggcttcagcctccccaccttcttcagccacctctctttttcagttggctgacttccacacctagcatctcatgagtgccaagcaaaaggagagaagagagaaatagcctgcgctgttttttagtttgggggttttgctgtttccttttatgagacccattcctatttcttatagtcaatgtttcttttatcacgatattattagtaagaaaacatcactgaaatgctagctgcaagtgacatctctttgatgtcatatggaagagttaaaacaggtggagaaattccttgattcacaatgaaatgctctcctttcccctgcccccagaacttttatccacttacctagattctacatattctttaaatttcatctcaggcctccctcaaccccaccacttcttttataactagtcctttactaatccaacccatgatgagctcctcttcctggcttcttactgaaaggttaccctgtaacatgcaattttgcatttgaataaagcctgctttttaagtgggaattc

SEQ ID NO: 121 - DNA, 974 bp, Homo sapiens
gtgggagggaggctcggcgctcaggaagcatggcactctggcgggcataccagcgggccctggccgctcacccgtggaaagtacaggtcctgacagctgggtccctgatgggcctgggtgacattatctcacagcagctggtggagaggcggggtctgcaggaacaccagagaggccggactctgaccatggtgtccctgggctgtggctttgtgggccctgtggtaggaggctggtacaaggttttggatcggttcatccctggcaccaccaaagtggatgcactgaagaagatgttgttggatcaggggggctttgccccgtgttttctaggctgctttctcccactggtaggggcacttaatggactgtcagcccaggacaactgggccaaactacagcgggattatcctgatgcccttatcaccaactactatctatggcctgctgtgcagttagccaacttctacctggtcccccttcattacaggttggccgttgtccaatgtgttgctgttatctggaactcctacctgtcctggaaggcacatcggctctaagcctgcctcactccatcgtttccaccttgcagtgatgcagcttgaccctggaacggtcagacaacctcctcaaagtgggcataccagtttccacggggttgggttgccggtcagagcttaagaggactagcacctgcaatgccctcttcactctaaatgtacactgactgctttagagcccttgataatagtcttattcccaccacatactaggcactccataaatatctgttgaaccttcatgaccttatcaactttacacccatatccagcaaatgccactcatccccactcttcatagacacatttgttactctaaccctgcctaggcttcttgtagctccagctctttagagactccgggaaccctttatatggtgcctcagtaaatatgttattaaatatgtaatccgg

SEQ ID NO: 122 - DNA, 505 bp, Homo sapiens
gtcatgaacaatgtcacctgtactcggatctatgaaaaagtagaataaaaattccatcatcactttggacaggagttaattaagagaatgaccaagctcagttcaatgagcaaatctccatactgtttctttcttttttttttcattactgtgttcaattatctttatcataaacattttacatgcagctatttcaaagtgtgttggattaattaggatcatccctttggttaataaataaatgtgtttgtgctaatatatcttgtatgcattctttaaaccttacaggaaattagtgatgagttttaataattattaattgagtaaaggttggggcagtcttgagggtactatattgagatgacactctagcaatttatatagatagctactcttacaggaaatactgtaccaattatttaagcttgccctatactatttgaactttgtatgaattcaggaatcttgaatttctggcagagaccattctcaataaaaggtgact

SEQ ID NO: 123 - DNA, 1185 bp, Homo sapiens
atggccgacaaggtcctgaaggagaagagaaagctgtttatccgttccatgggtgaaggtacaataaatggcttactggatgaattattacagacaagggtgctgaacaaggaagagatggagaaagtaaaacgtgaaaatgctacagttatggataagacccgagctttgattgactccgttattccgaaaggggcacaggcatgccaaatttgcatcacatacatttgtgaagaagacagttacctggcagggacgctgggactctcagcagctcctcaggcagtgcaggacaacccagctatgcccacatcctcaggctcagaagggaatgtcaagctttgctccctagaagaagctcaaaggatatggaaacaaaagtcggcagagatttatccaataatggacaagtcaagccgcacacgtcttgctctcattatctgcaatgaagaatttgacagtattcctagaagaactggagctgaggttgacatcacaggcatgacaatgctgctacaaaatctggggtacagcgtagatgtgaaaaaaaatctcactgcttcggacatgactacagagctggaggcatttgcacaccgcccagagcacaagacctctgacagcacgttcctggtgttcatgtctcatggtattcgggaaggcatttgtgggaagaaacactctgagcaagtcccagatatactacaactcaatgcaatctttaacatgttgaataccaagaactgcccaagtttgaaggacaaaccgaaggtgatcatcatccaggcctgccgtggtgacagccctggtgtggtgtggtttaaagattcagtaggagtttctggaaacctatctttaccaactacagaagagtttgaggatgatgctattaagaaagcccacatagagaaggattttatcgctttctgctcttccacaccagataatgtttcttggagacatcccacaatgggctctgtttttattggaagactcattgaacatatgcaagaatatgcctgttcctgtgatgtggaggaaattttccgcaaggttcgattttcatttgagcagccagatggtagagcgcagatgcccaccactgaaagagtgactttgacaagatgtttctacctcttcccaggacattaaaataaggaaactgtatgaatgtctgcgggcagg

SEQ ID NO: 124 - DNA, 2277 bp, Homo sapiens
caagaagacggggattgaggaggcctcaggcgcctttgtctacctgcggcagccgtactatgccacgagggtgaatgcggctgacattgagaaccgagtgttggaactgaacaagaagcaggagtccgaggaggaagtggctgattactgagcggttcttcctcacctggcttgggccactgtgcacagctgtgccgctggctcagccccgccccctgcggccctccgccgtggcttccccctccctacagagagatgctgtcccgtgggtggtttcaccgagacctcagtgggctggatgcagagaccctgctcaagggccgaggtgtccacggtagcttcctggctcggcccagtcgcaagaaccagggtgacttctcgctctccgtcagggtgggggatcaggtgacccatattcggatccagaactcaggggatttctatgacctgtatggaggggagaagtttgcgactctgacagagctggtggagtactacactcagcagcagggtgtcctgcaggaccgcgacggcaccatcatccacctcaagtacccgctgaactgctccgatcccactagtgagaggtggtaccatggccacatgtctggcgggcaggcagagacgctgctgcaggccaagggcgagccctggacgtttcttgtgcgtgagagcctcagccagcctggagacttcgtgctttctgtgctcagtgaccagcccaaggctggcccaggctccccgctcagggtcacccacatcaaggtcatgtgcgagggtggacgctacacagtgggtggtttggagaccttcgacagcctcacggacctggtagagcatttcaagaagacggggattgaggaggcctcaggcgcctttgtctacctgcggcagccgtactatgccacgagggtgaatgcggctgacattgagaaccgagtgttggaactgaacaagaagcaggagtccgaggatacagccaaggctggcttctgggaggagtttgagagtttgcagaagcaggaggtgaagaacttgcaccagcgtctggaagggcagcggccagagaacaagggcaagaaccgctacaagaacattctcccctttgaccacagccgagtgatcctgcagggacgggacagtaacatccccgggtccgactacatcaatgccaactacatcaagaaccagctgctaggccctgatgagaacgctaagacctacatcgccagccagggctgtctggaggccacggtcaatgacttctggcagatggcgtggcaggagaacagccgtgtcatcgtcatgaccacccgagaggtggagaaaggccggaacaaatgcgtcccatactggcccgaggtgggcatgcagcgtgcttatgggccctactctgtgaccaactgcggggagcatgacacaaccgaatacaaactccgtaccttacaggtctccccgctggacaatggagacctgattcgggagatctggcattaccagtacctgagctggcccgaccatggggtccccagtgagcctgggggtgtcctcagcttcctggaccagatcaaccagcggcaggaaagtctgcctcacgcagggcccatcatcgtgcactgcagcgccggcatcggccgcacaggcaccatcattgtcatcgacatgctcatggagaacatctccaccaagggcctggactgtgacattgacatccagaagaccatccagatggtgcgggcgcagcgctcgggcatggtgcagacggaggcgcagtacaagttcatctacgtggccatcgcccagttcattgaaaccactaagaagaagctggaggtcctgcagtcgcagaagggccaggagtcggagtacgggaacatcacctatcccccagccatgaagaatgcccatgccaaggcctcccgcacctcgtccaaacacaaggaggatgtgtatgagaacctgcacactaagaacaagagggaggagaaagtgaagaagcagcggtcagcagacaaggagaagagcaagggttccctcaagaggaagtgagcggtgctgtcctcaggtggccatgcctcagccctgaccctgtggaagcatttcgcgatggacagactcacaacctgaacctaggagtgccccattcttttgtaatttaaatggctgcatcccccccacctctccctgaccctgtatatagcccagccaggccccaggcagggccaacccttctcctcttgtaaataaagccctgggatcactgaaaaaaaaaaaaaa

SEQ ID NO: 125 - DNA, 2248 bp, Homo sapiens
  misc_feature (2084)..(2084): Each "n" represents a nucleotide selected from a, t, g or c, or contains no nucleotide.
cggcacgaggtgacttccttgttgtgagccccggcccggcagtgtcccgactcgtagccccgctgttcttaatccgggccgctagcctgagtctaggtcgcagccgcagccccaccccgtcggtcaccttttcagcgcaggtcctttccccgcacgccctgcgctccctaacatgcccaaccccagcagcacctcctctccctaccccctccctgaggaaattaggaacctgttggcagatgttgaaacatttgtagcagatatactgaaaggagaaaatttatccaagaaagcaaaggaaaagagagaatcccttattaagaagataaaagatgtaaagtctatctatcttcaggaatttcaagacaaaggtgatgcagaagatggggaagaatatgatgacccttttgctgggcctccagacactatttcattagcctcagaacgatatgataaagacgatgaagccccctctgatggagcccagtttcctccaattgcagcacaagaccttccttttgttctaaaggctggctaccttgaaaaacgcagaaaagatcacagctttctgggatttgaatggcagaaacggtggtgtgctctcagtaaaacggtattctattattatggaagtgataaagacaaacaacagaaaggtgaatttgcaatagatggctacagtgtcagaatgaataacactctaagaaaggatggaaagaaagattgctgttttgaaatctctgctcctgataaacgtatatatcagtttacagcatcttctcccaaagatgctgaagaatgggtacagcagctgaaatttgtattgcaagatatggaatctgatattattcctgaggattatgatgagagaggagaattatatgatgatgttgatcatcctctaccaataagcaatccactaacaagcagtcaaccaatagatgatgaaatttatgaagaacttccagaagaagaagaggacagtgctccagtgaaagtggaagaacaaaggaagatgagtcaggatagtgtccatcacacctcaggggataagagcactgattatgctaatttttaccagggattgtgggattgtactggagctttttctgatgagttgtcatttaagcgtggtgatgtgatttacattcttagcaaggaatacaatagatatggctggtgggtaggagaaatgaagggagccattggcttggtgcctaaagcctacataatggagatgtatgatatttgagagtcctggaaaaggaaaattcttctgcttgtctgcaaatgctttggatttagaagcgtcatgaaagcacgagtgacagctcctaacctctccttgttttattaaacattacttatctttgactgttattttatgcagtcgctcattaaaatattcctctgatgtgaaattaaatgaaggatattaatgtaaattagatgcaaccagttaagttatacctgttgctattttgcaaagaaataattatagtttttatttacccatttgatttgtgtgaagaattcatcactattttatacgtaacatatagtctactatagcatagtatgctactattgctacttctggtgtgatttgtaatgtttcttaatcattggacatcaattatttttagagagtaatgtataatttcatagcattttaaatttacgtgtatcatgcgagttttttttggtagatgctgaagaatgtggttgctaaacaaagaatgctaaagaatgttcaaactttatagataactttattgttattatttattttcacacatttaattcctattaagtacagccgcaagaaagaaaaaatgatgaagttgcaaatggcagtgtgctgtcacctgcaacagaagtgcgtaccagaagtatgactcatgcaaagcattttaccgtacaaatatcctggtgcgatgatgggcctggcaacattttctactgtacttttgtttaaatttaatgaaacaaaaaattcctaagaaataccaccctaccactaacaaaatggtataaagaatctcccagccaggccaacatggtgaaaccctgtctctactaanaattagccaagtgtggtaatgttcacctgcagtcccagctacttgggaggccaaggcacgagaattgcttgaacaaggtaggcagaggttgcagtgagccaagatcgcgccactgcactccagcctgggcgacagagtgagactccatctcagaaaaaaaaaaa

SEQ ID NO: 126 - DNA, 1110 bp, Homo sapiens
gacagagcccgggccacggagctccttgccagctctcctcctcgcacagccgctcgaaccgcctgctgagccccatggcccgcgccacgctctccgccgcccccagcaatccccggctcctgcgggtggcgctgctgctcctgctcctggtggccgccagccggcgcgcagcaggagcgcccctggccactgaactgcgctgccagtgcttgcagaccctgcagggaattcacctcaagaacatccaaagtgtgaaggtgaagtcccccggaccccactgcgcccaaaccgaagtcatagccacactcaagaatgggcagaaagcttgtctcaaccccgcatcgcccatggttaagaaaatcatcgaaaagatgctgaaaaatggcaaatccaactgaccagaaggaaggaggaagcttattggtggctgttcctgaaggaggccctgccttacaggaacagaagaggaaagagagacacagctgcagaggccacctggcttgcgcctaatgtgtttgagcatacttaggagaagtcttctatttatttatttatttatttatttgtttgttttagaagattctatgttaatattttatgtgtaaaataaggttatgattgaatctacttgcacactctcccattatatttattgtttattttaggtcaaacccaagttagttcaatcctgattcatatttaatttgaagatagaaggtttgcagatattctctagtcatttgttaatatttcttcgtgatgacatatcacatgtcagccactgtgatagaggctgaggaatccaagaaaatggccagtaagatcaatgtgacggcagggaaatgtatgtgtgtctattttgtaactgtaaagatgaatgtcagttgttatttattgaaatgatttcacagtgtgtggtcaacatttctcatgttgaagctttaagaactaaaatgttctaaatatcccttggcattttatgtctttcttgtaagatactgccttgtttaatgttaattatgcagtgtttccctctgtgttagagcagagaggtttcgatatttattgatgttttcacaaagaacaggaaaataaaatatttaaaaatat

SEQ ID NO: 127 - DNA, 756 bp, Homo sapiens
  misc_feature (489)..(560): Each "n" represents a nucleotide selected from a, t, g or c, or contains no nucleotide.
aatttttttttttttttttttttttgacgttggcagtgacatttatttttctgggggaggggagttatatacagcagtgacccggagcccctcacccccaccaggcttaggtggggacaggaggcgttggcagaaggcacacagtggcagtagcccagaagaggccaggaagtaagggtgggtatgtgatgtgtcctgggagacccagatgaggaaattgaggctcagtgagggcctcaggtcacacagcaaggtgcgaaggcagctagtcccgagagcttgtggtggttgcttctctcttgcctgggctacaggaggacgcaggggcagcccccgcccttcttcctgggggcactgggagggctcggtgggagctcttgttcctggtatttccggacagcccgcaccagctgctcaaaagcctcgtccacgttgagacgcagtttggccgaggcctcaaagtaggccacgtggtgggaggcgccgaangcagaggcttctgatcggnggacctggcgctgtgactccagatctgccttgttcccgaccaacacaacggngaagtcgtcgcggtccttgacccgcagaatctgcgtgaagagctggcccacctcggtgaaactctgccggtcattaatggcgaacaccagcaggaagcccgtgccagcacgcatgtactgctctctcatggccccggactcttcctgggcccgcggggtccaggatgtccagccgggctgggatgccatccacacc

SEQ ID NO: 128 - DNA, 3694 bp, Homo sapiens
gctccgggccgcgctgcccgcgctcctgctgccgttgctgggcctcgccgctgctgccgtcgcggactgtccttcatctacttggattcagttccaagacagttgttacatttttctccaagaagccatcaaagtagaaagcatagaggatgtcagaaatcagtgtactgaccatggagcggacatgataagcatacataatgaagaagaaaatgcttttatactggatactttgaaaaagcaatggaaaggcccagatgatatcctactaggcatgttttatgacacagatgatgcgagtttcaagtggtttgataattcaaatatgacatttgataagtggacagaccaagatgatgatgaggatttagttgacacctgtgcttttctgcacatcaagacaggtgaatggaaaaaaggaaattgtgaagtttcttctgtggaaggaacactatgcaaaacagctatcccatacaaaaggaaatatttatcagataaccacattttaatatcagcattggtgattgctagcacggtaattttgacagttttgggagcaatcatttggttcctgtacaaaaaacattctgattctcgtttcaccacagttttttcaaccgcaccccaatcaccttataatgaagactgtgttttggtagttggagaagaaaatgaatatcctgttcaatttgactaagtttttggtaatcttgcactaagacatcaacaaatgccctggcagagataacttgggaaagattttaatataaaacttgacattggatattagagctttaatggtattccttattccagtaacatttttatgtactcatctgctgtgaaaagtctttaggttcattaaaaaaacaggttttagaaatgatcttagatctaatatagtgattttaagcatcccgtcaaaggcagaatctgtcacttgaatgaaggaaagcttaaagcccaagcagataaaaataaaagcccagcctatttgtcttgcctgctgtatcttccctatttagttgacccactttagtttatatgtttattagtaaacatgaaatggggaataagtgattttaagtacatcccatacatttaaatatctttgataattgttatttttttggcagataattcctctagaatgtgtatctttttatgatttagatgaagaaaattttacaacttttaacaccccacaccaattttagtttcattacttttacacacaccattttatcacaaatgactcaagttttaatgaatgtttataaattatttgaaacaaaatatgatcgctgtgtccaggatggcatagagaaagctggcaattaggttaacacttacatattatagtgcccctttaaggatttctctcttgccaccataccttttgtactttcccctatacaagatgtatctcattctcctcaagcatttataaatttttccttcaatgacatgaaaactgtgcaagcaaaaaccgaagaaaaacacttaagtacaactgtagtgacagtgatcaaagttttcagtgcatttattgtacattttaagaaaaaggtgaaaatcatttggggagtaaaaaaatgaaaaagctgaaacgagtaattttcctcaccatcaataaaccaaaaacaggaaagataaagaatgtataaatttcacgtaaattagtcacgtatcacttatcaatggggatacgttctaagaaatgcatagttagggaatcttgtgtgaaaatcagcttgtatttacacaaacccagatggtagagcctattttgtcccaaacctacacagcatgttactgtgctgaatactgcagacaattgtaacacaatatttgtgtatctaaatatagaaaaggtacagtaaaaatatggtctactaaggaaacactgttctatatgtggtccattactgactgaagtatactgtctagaagtctgaggctcaaagaaaagtaatccctcttctgaatccacaccccatcaattatcttactttcttctggggagatagatagatatactatctcactagcttgactaatggcaacaaagttccagcttgtgtagtctctttttattgaccacatgaatcgaaaacactcatcacaattaatggcactatcattaatgagacatgagtaactaaaaagtgatagaaaactattacagtgcggctacatggtactgaaaatgcaggcattacaccagctgttacacaagcacaagcatgctctgtaagagctttacatttctgagattttgtatagtgattgagatgtctattttattattgatagactattactaatgtcaatattgaacactaccctggaattcctgcctggttttcctacccaaattgtaccactccttgaagaactacaggcacagtaaaaaaatatggcgtattatgtgaactaaaagagttctaaaggagttcttaaaggagtggtagaatttgggtaggaaagtgattaagtccaacttaaaaccaacagtctcaaacgtctacaactacaatgtccaatgagccactagccacatgaggctatttaagtaaatttagtttaaaatccagttttcgaattacattagccacattgtcaagtgttcaaatcacaggtggttagtggctactgtactgggcaacatacattatagaacattttcattataggaagttttattgggcagtgctgctcttaaatcctaccttccactcaactcccatacaactttcttttgtacattttgatactttctacctaatggcagctcttccaaaatagctgctttaaactctgatttaattttcaatatttggtttcatttttcaacaggccaagaggcctctggtaatgaagtgctatatatatatatatatgacggagtctcactgtgctgcccaggctacagtgcagtggctcgatcttggctctctccaatctccgccttgcaggttttcaagcaattctcctgcctcagcctccttagtagctgggaccacagacatctgtcaccacacccagctaactttttgtatttttggtagagacggggtttcgccatattgactgggctggtctcaaactcctgacctcaagtgatccacccaccttggtctcccaaagtgctgggattacatgcgtgagccaccacacttggcctacattttttctttatataccagaacatctataacaggcaccttatctactcattagtgaagagataattggattacacaggcaggcttgtttactacatccagaatgtagaaactgctttcttcaacatcttggttctagctagtaataacaatataattctttggcagatattcagaataacattttaaactacattttcttagaaaattgcattcttgtagtgagcagtgtatggtctcttttgttcagaatttaaaactgataaccaatgaaagccttttctcttattcctctaccgtcatttacatgataatctgaagctaatatgacaatatttaaatactaagtggtactagggaactacaagaatactgtaaagcttaagccattgttatcactgtcatttagcatttaataacaaaactatacagaattatgtgcataccaatgaatgttttgtaccatctagttaaattttttaaataaagttttatgggttaagcag

SEQ ID NO: 129 - DNA, 534 bp, Homo sapiens
tttgcagtgactgagaaatgctccgacttttgccaagatgacctggcagatgatgacatcatgttgctagacaatggccaagaggtctacatgtgggtggggacccagactagccaggtggagatcaagctgagcctgaaggcctgccaggtatatatccagcacatgcggtccaaggaacatgagcggccgcgccggctgcgcctggtccgcaagggcaatgagcagcacgcctttacccgctgcttccacgcctggagcgccttctgcaaggccctggcctaagacaggctggcacagccccaggcttggtgaggaagaggaaggggcctcatccactgtctgctagcaaagaatgtactcaggtgacaccacctgctccagccacgtccagtgccacagtccccagtagcctcaagcagcaccaatggggatgaccctgacaggtgccctcaggggtctgggaaatccaactctctccacagtgtgagtgcacgtgtgaagccccctcactcttccgctagggataaagca

SEQ ID NO: 130 - DNA, 245 bp, Homo sapiens
ggtttacacgctaatcccgattcaccctgtccaaactgcctaagccctccgccattctcaagccctgcagtcacagctacacagatcacagcttcagccaggagctgggcagaaggccaagaggctgttcccaccaggctgctcagggctggtcttttaggacccttcccttgagccctctatggtgtggcaaagccttcattgccttaactggagccccatcagctccagctgctctgtcttct

SEQ ID NO: 131 - DNA, 1370 bp, Homo sapiens
ggcggcggcagctgtacagggcgggagaagcggtggtagcggaggctgtagtggggctggtggtgcttccaactgcgggacaggaagtggccgtagcggcttgttggataagtggaagatagatgataagcctgtaaaaattgacaagtgggatggatcagctgtgaaaaactctttggatgattctgccaaaaaggtacttctggaaaaatacaaatatgtggagaattttggtctaattgatggtcgcctcaccatctgtacaatctcctgtttctttgccatagtggctttgatttgggattatatgcacccctttccagagtccaaacccgttttggctttgtgtgtcatatcctattttgtgatgatggggattctgaccatttatacctcatataaggagaagagcatctttctcgtggcccacaggaaagatcctacaggaatggatcctgatgatatttggcagctgtcctccagtcttaaaaggtttgatgacaaatacaccttgaagctgaccttcatcagtgggagaacaaagcagcagcgggaagccgagttcacaaagtccattgctaagttttttgaccacagtgggacactggtcatggatgcatatgagcctgaaatatccaggctccatgacagtcttgccatagaaagaaaaataaagtagccaattctaaaagtagccctctttctcctggatcttgctgaattagtggcttggggggtgggggagataaaaagaacttaaaatgggtaaagtaagaaatgttaaaaagtccctgttttgtcctgaaattttagtctattctgggtaaataggattttctgacacagatatgagaagttgtagctctgatgtctagctgtagtctccttgatctgctgattgcattattttaatttgcttttctgggaaagcagttttgctaaaagctgtacagactttttcttttgtacctagcagtactttatatagtatagctttgggccatgtagcattttaagactcaattttaaaaaattattaatctgttgctgactcttaattcctatttcaatatgtgtttccttgaagaattcaggatacaacttcttgtgtatgacagctttccttcacacactatttttgtgggtgtgtatatatctgatttgggaagaatttaaaaaacacatagctttttaatttgtttgaaacagactttctgcctgttacatttttgcttttaaccaattaaagaagccaatggcattttagttttatattgtgttttccactagtatatccctgttgatttgtttgtgccttttattaactgccattttctaaaatttttttcaataaaaggaaggaagatgtg

SEQ ID NO: 132 - DNA, 696 bp, Homo sapiens
  misc_feature (606)..(694): Each "n" represents a nucleotide selected from a, t, g or c, or contains no nucleotide.
tttttttttgcatttccagtaatagtttattgatttccaaatgcacaggggcaccaagtccgaacatcctgggatagcagtaaatctctcttacaaaataatttacagtatgaaaatgatatactgaaacattaacccaaacgtgtaattcccttgaaagattcagtgttcccttgtttaatgtaaagggtggaaggggaagattcctaaggagggaatgtgactgtgcacaggaaaataggcagaggacaatggattcattggttctccccattcatgcagtgtggcctgtcactgtagaaagactggtcaggtttaaccctcattaagtattaatctgctgtcccctcaaagtcatatcaagcccagtatggttccgtggctttttttgcaccaatgtatccataagtgtctccacttattttcatttttctgctctggccctcgttctgctgtttctggtatgttctcagttccaattatactatctatctaccaggcaggctccagaatcaagaactgccgagtctatggtttctggaatgggacaggtaggggcttcataagcacgctgataaaggcataataatggactgaagctccaangggctcttttccctgagngggcngactcatcctaagggattttaacaaaatcganggttgnccagtanaggtaattctatggagcagntt

SEQ ID NO: 133 - DNA, 227 bp, Homo sapiens
gcagcctgacctcttcaaagatatcatcaacatgctattttatcatgacaggtttaaagtctttgcagactacgaagcctatgtcaagtgtcaagataaagtgagtcagctgtacatgaatccaaaggcctggaacacaatggtactcaaaaacatagctgcctcggggaaattctccagtgaccgaacaattaaagaatatgcccaaaacatctggaacgtggaac

SEQ ID NO: 134 - DNA, 1385 bp, Homo sapiens
  misc_feature (20)..(1158): Each "n" represents a nucleotide selected from a, t, g or c, or contains no nucleotide.
ggggccccaaaagaaaaggnaagancctttgggtaacccaatcccaaagaagaaaacctggttttggtttaagcccccccctctggggcctcccttcctctcttcgctgggaacctgggtcccctctggacctttagtgctctccccctcttctcctgcaggatgagaaatactggagccggcggtacaagaacaacgaggcagccaagcggtcccgtgacgcccggcggctcaaggagaaccagatatcggtgcgggcggccttcctggagaaggagaacgccctgctgcggcaggaagttgtggccgtgcgccaggagctgtcccactaccgcgccgtgctgtcccgataccaggcccagcacggggccctgtgaggctgccccacatccccacctggcggagctctcctccgccttgctgagacttacgccctgttcccttcctgccctgtgcccacgggccggccagctgggtgccccagggacgtgataatgcagataaatacatttatatttttaagaaaaagcgagcctcccccctcccttgcgggggcggggagggttctctgtgtgtgtccccggcacgtcagggaccctatcctcccaccgcctccgttaacacgatcctgaataaatcttgagaaccccagagccagctgttgtggaagaagaggggcagcatccctggcatactggctgcagcccgtgggcagctccgggctgtcgtccatagagggcaggcgctgctggaagtgctggagtctgagtcctccctgcgggctgtcggatggaggaagggcagaaggtctgagaggaatgaagcgactgcctttattgcataggaccttttcaattgctttttagaattggggacggaggacgcgcatgagacgaacaggggatatgaatttccccgcccccacccgcggggagaggaacattagtacaaatcctagcgccggccccggggaacctgcccctcctgggctgattggccagctaaatggaggcaccggagtggatggggcgagccttcgggccctgaccggccgactcactgaggcctaccccagccagtacattccaggtcctgtcattgggcgacgcgtaaaatagactccgccctcagccatcctggccgggtaggagcaggtgncaagcgtcaggactgagccctgccccgtaagggcggccccagatcagacgccaggccccgccctcattgatcaggcactaccctcgggacgagcccatttctctttaaccgtgacgacgcccaccttccagcatcacgtctggtcccatgaaagcgagcgcaatcctgagacggggccagggcccctgccaccacaactctagcagccaggccacattccctagctc

SEQ ID NO: 135 - DNA, 4057 bp, Homo sapiens
gccaataaagcaaacacttccggtgactttgagaaagatgatgatgcctataagactgaggacagcgatgacatccattttgaaccagtagttcaaatgcctgaaaaagtagaacttgtaacaggagaagaaggtgaaaaagttctgtattcacagggggtaaaactatttagatttgatgctgaggtaaggcagtggaaagaaaggggcttggggaacttaaaaattctcaaaaacgaggtcaatggcaaactaagaatgctgatgcgaagagaacaagtactaaaagtgtgtgctaatcattggataacgactacaatgaacctgaagcccctctctggatcagatagagcatggatgtggtcagccagtgatttctctgatggtgatgccaaactagagcggttggcagcaaaatttaaaacaccagagctggctgaagaattcaagcagaaatttgaggaatgccagcggcttctgttagacataccacttcaaactccccataaacttgtagatactggcagagctgccaagttaatacagagagctgaagaaatgaagagtggactgaaagatttcaaaacatttttgacaaatgatcaaacaaaagtcactgaggaagaaaataagggttcaggtacaggtgtggccggtgcctcagacacaacaataaaacccaatgctgaaaacactgggcccacattagaatgggataactatgacttaagggaagatgctttggatgatagtgtcagtagtagctcagtacatgcttctccattggcaagtagccctgtgagaaaaaatcttttccgctttgatgagtcaacaacaggatctaacttcagttttaaatctgctttgagtctatctaagtctcctgccaagttgaatcagagtgggacttcagttggcactgatgaagaatctgttgttactcaagaagaagagagagatggacagtactttgaacctgttgttcctttacctgatctagttgaagtatccagtggtgaggaaaatgaacaagttgtttttagtcacagggcagaaatctacagatatgataaagatgttggtcaatggaaagaaaggggcattggtgatataaagattttacagaattatgataataagcaagttcgtatagtgatgagaagggaccaagtattaaaactttgtgccaatcacagaataactccagacatgagtttgcaaaatatgaaagggacagaaagagtatgggtgtggactgcatgtgattttgcagatggagaaagaaaagtagagcatttagctgttcgttttaaactacaggatgttgcagactcgtttaagaaaatttttgatgaagcaaaaacagcccaggaaaaagattctttgataacacctcatgtttctcggtcaagcactcccagagagtcaccatgtggcaaaattgctgtagctgtattagaagaaatcacaagagagaggacagatgttattcagggtgatgatgtagcagatgcagcttcagaagttgaagtgtctagcacatctgaaacaacaacaaaagcagtggtttctcctccaaagtttgtatttggttcagagtctgttaaaagaatttttagtagtgaaaaatcaaaaccatttgcatttggcaacagttctgccactgggtctttgtttggatttagttttaatgcacctttgaaaagtaacaatagtgaaactagttcagtagcccagagtggatctgaaagcaaagtggaacctaaaaaatgtgaactgtcaaagaactctgatatcgaacagtcttcagatagcaaagtcaaaaatctctctgcttcctttccaacggaagaatcttcaatcaactacacatttaaaacaccagaaaaggagcctccattatggcatgctgaatttaccaaagaagaattggttcagaagctccgttccaccacaaaaagtgcagatcacttaaacggcctgcttcgggaaatagaggcaaccaatgcagtccttatggagcaaattaagcttctcaaaagtgaaataagaagattggaaaggaatcaagagcgagagaagtctgcagctaacctggaatacttgaagaacgtcttgctgcagttcattttcttgaagccaggtagtgaaagagagagacttcttcctgttataaatacgatgttgcagctcagccctgaagaaaagggaaaacttgctgcggttgctcaagatgaggaagaaaatccttcccgttcttctggatgagcatcctatcttcgtagttggtttggacttcgataggttgatggaaggaatacttctattaaccaaatagaatctgtttacaaaaatggttcgtgtgtgttaccattattcttttgtcaaaaagtgtgtatatgtgtttgcatttacatatatttgtacatctgtatgacagatgtattttaaaagtttcaacttgaagtaaaagtacaacagcttgaagtgttgataccaggccacagccctctaactcatgtgatctcccatgcatgctgccagaataaaaccaccaggaatgaattcactccccacttctctggaacctcaggacccgcccatttctcggcagtactgtgaattttgaagttaaactaaattttggtaccataccaactggaatttaggctttaaaaataatgtttcaaggccaggtgtggtgattcatgcctgaaatcccactactttgggaggctgaggctggagaatcgcttgaggctagtgagctgtgattgtaccactgcactccagctcggggaacagagcgagaccttgtctctaaaaataataatagtaataaaaataacgttttatgactatttattgcaaggtcagatttacagattgttataaattgttgagaaatttttgtgattagaatatgaaggaaaaagctttgttggtaaaagtgacatgttaaggggctatgaagtaaatatgctgcagttaattgtgctaagttaaaatacagtttagttatttgctttaaaataaactcttctttttttctttaaagtatactacctcaaaactcattatgttgtcagagccctagagctggctagtgtaacactgactatgagtaggtgggcccaccacttgagttgaggtgatttcatggtgtctttccaggctcttgatagggtgtcactgcatgcaagccatgaatctgttttgagaatcctctccattttcccaaataaaaacctatcccaacagtgactatatcactcagcattggatctaaatataaaagtggtgctttcagtgtttttggcagatagtgttccataacctttccatcagaagggattttagacaccttagaggtccgtgctacatcttcacagttcctccgaataaccttaggtggtagtgttacttgcctttgacacctgtgcatatgttttaatgactagatccaaactgtgttgttcttaaatcaaaaattggataatttttaatatttatgtattaatcacacagtgtgctctctgaagttctcttaagccttcagtttatactcttaattttctttctgagctggggaactgactttgcactttggttacacagaacattggtttccaatttagtttaactgaaatttgctgctgatatgttgagtttgttctttaaaaaatatctcatatatctcgtctttcctccttagaagaacagacctaactagcgaatgtatgaatgaaaatgcatctatttcagagccgacatgaagagtttagtttttttactttataaactgtgaatatgagtatgccagctgcattagatgtaactaatcatatttaaatatatttcactttgactttagaccttttgaagtctgtataaacttgttttgaaatacagtctccacttacgaatgtcataacaaaatacttttttgcatgataaaaaattactttgattacaaaaggcatattctttcatggtttctgcaatgagaggaagtgtaatgattattttaatatttctattaaaactgtatattttt

SEQ ID NO: 136 - DNA, 1769 bp, Homo sapiens
cctcactgactataaaagaatagagaaggaagggcttcagtgaccggctgcctggctgacttacagcagtcagactctgacaggatcatggctatgatggaggtccaggggggacccagcctgggacagacctgcgtgctgatcgtgatcttcacagtgctcctgcagtctctctgtgtggctgtaacttacgtgtactttaccaacgagctgaagcagatgcaggacaagtactccaaaagtggcattgcttgtttcttaaaagaagatgacagttattgggaccccaatgacgaagagagtatgaacagcccctgctggcaagtcaagtggcaactccgtcagctcgttagaaagatgattttgagaacctctgaggaaaccatttctacagttcaagaaaagcaacaaaatatttctcccctagtgagagaaagaggtcctcagagagtagcagctcacataactgggaccagaggaagaagcaacacattgtcttctccaaactccaagaatgaaaaggctctgggccgcaaaataaactcctgggaatcatcaaggagtgggcattcattcctgagcaacttgcacttgaggaatggtgaactggtcatccatgaaaaagggttttactacatctattcccaaacatactttcgatttcaggaggaaataaaagaaaacacaaagaacgacaaacaaatggtccaatatatttacaaatacacaagttatcctgaccctatattgttgatgaaaagtgctagaaatagttgttggtctaaagatgcagaatatggactctattccatctatcaagggggaatatttgagcttaaggaaaatgacagaatttttgtttctgtaacaaatgagcacttgatagacatggaccatgaagccagttttttcggggcctttttagttggctaactgacctggaaagaaaaagcaataacctcaaagtgactattcagttttcaggatgatacactatgaagatgtttcaaaaaatctgaccaaaacaaacaaacagaaaacagaaaacaaaaaaacctctatgcaatctgagtagagcagccacaaccaaaaaattctacaacacacactgttctgaaagtgactcacttatcccaagaaaatgaaattgctgaaagatctttcaggactctacctcatatcagtttgctagcagaaatctagaagactgtcagcttccaaacattaatgcaatggttaacatcttctgtctttataatctactccttgtaaagactgtagaagaaagcgcaacaatccatctctcaagtagtgtatcacagtagtagcctccaggtttccttaagggacaacatccttaagtcaaaagagagaagaggcaccactaaaagatcgcagtttgcctggtgcagtggctcacacctgtaatcccaacattttgggaacccaaggtgggtagatcacgagatcaagagatcaagaccatagtgaccaacatagtgaaaccccatctctactgaaagtgcaaaaattagctgggtgtgttggcacatgcctgtagtcccagctacttgagaggctgaggcaggagaatcgtttgaacccgggaggcagaggttgcagtgtggtgagatcatgccactacactccagcctggcgacagagcgagacttggtttcaaaaaaaaaaaaaaaaaaaaacttcagtaagtacgtgttatttttttcaataaaattctattacagtatgtcaaaaaaaaaaaaaaaaaa

SEQ ID NO: 137 - DNA, 4089 bp, Homo sapiens
cgcgttcacagccccagcgcaggtctggatgtaccgactgcttttggaataaaaagattcccaggatgtgagcaacacgggaccgatatgatgcttcctggtgtgtttagtggttggtgccattccaattttctgtgctgaaatcattctgaaaactcaaacagtagacttcagcacacaaggaaagccaaagccatttgagggggaataaagccaaaagcctttcaccttattcgttccaagaatctcaccgccccctccttatccccctccaaaaataagccattgcacacagacaggcagcatggctagcaaacgaaaatctacaactccatgcatggttcggacatcacaagtagtagaacaagatgtgcccgaggaagtagacagggccaaagagaaaggaatcggcacaccacagcctgacgtggccaaggacagttgggcagcagaacttgaaaactcttccaaagaaaacgaagtgatagaggtgaaatctatgggggaaagccagtccaaaaaactccaaggtggttatgagtgcaaatactgcccctactccacgcaaaacctgaacgagttcacggagcatgtcgacatgcagcatcccaacgtgattctcaaccccctctacgtgtgtgcagaatgtaacttcacaaccaaaaagtacgactccctatccgaccacaactccaagttccatcccggggaggccaacttcaagctgaagttaattaaacgcaataatcaaactgtcttggaacagtccatcgaaaccaccaaccatgtcgtgtccatcaccaccagtggccctggaactggtgacagtgattctgggatctcggtgagtaaaacccccatcatgaagcctggaaaaccaaaagcggatgccaagaaggtgcccaagaagcccgaggagatcacccccgagaaccacgtggaagggaccgcccgcctggtgacagacacagctgagatcctctcaagactcggcggggtggagctcctccaagacacattaggacacgtcatgccttctgtacagctgccaccaaatatcaaccttgtgcccaaggtccctgtcccactaaatactaccaaatacaactctgccctggatacaaatgccacgatgatcaactctttcaacaagtttccttacccgacccaggctgagttgtcctggctgacagctgcctccaaacacccagaggagcacatcagaatctggtttgccacccagcgcttaaagcatggcatcagctggtccccagaagaggtggaggaggcccggaagaagatgttcaacggcaccatccagtcagtacccccgaccatcactgtgctgcccgcccagttggcccccacaaaggtgacgcagcccatcctccagacggctctaccgtgccagatcctcggccagactagcctggtgctgactcaggtgaccagcgggtcaacaaccgtctcttgctcccccatcacacttgccgtggcaggagtcactaaccatggccagaagagacccttggtgactccccaagctgcccccgaacccaagcgtccacacatcgctcaggtgccagagcccccacccaaggtggccaaccccccgctcacaccagccagtgaccgcaagaagacaaaggagcagatagcacatctcaaggccagctttctccagagccagttccctgacgatgccgaggtttaccggctcatcgaggtgactggccttgccaggagcgagatcaagaagtggttcagtgaccaccgatatcggtgtcaaaggggcatcgtccacatcaccagcgaatcccttgccaaagaccagttggccatcgcggcctcccgacacggtcgcacgtatcatgcgtacccagactttgccccccagaagttcaaagagaaaacacagggtcaggttaaaatcttggaagacagctttttgaaaagttcttttcctacccaagcagaactggatcggctaagggtggagaccaagctgagcaggagagagatcgactcctggttctcggagaggcggaagcttcgagacagcatggaacaagctgtcttggattccatggggtctggcaaaaaaggccaagatgtgggagcccccaatggtgctctgtctcgactcgaccagctctccggtgcccagttaacaagttctctgcccagcccttcgccagcaattgcaaaaagtcaagaacaggttcatctcctgaggagcacgtttgcaagaacccagtggcctactccccaggagtacgaccagttagcggccaagactggcctggtccgaactgagattgtgcgttggttcaaggagaacagatgcttgctgaaaacgggaaccgtgaagtggatggagcagtaccagcaccagcccatggcagatgatcacggctacgatgccgtagcaaggaaagcaacaaaacccatggccgagagcccaaagaacgggggtgatgtggttccacaatattacaaggaccccaaaaagctctgcgaagaggacttggagaagttggtgaccagggtaaaagtaggcagcgagccagcaaaagactgtttgccagcaaagccctcagaggccacctcagaccggtcagagggcagcagccgggacggccagggtagcgacgagaacgaggagtcgagcgttgtggattacgtggaggtgacggtcggggaggaggatgcgatctcagatagatcagatagctggagtcaggctgcggcagaaggtgtgtcggaactggctgaatcagactccgactgcgtccctgcagaggctggccaggcctagacagggaagtctgttagaactgctgtgctgatcaacgggacgctccgtctttgaagaaagaagagatggtctctccccagccatgggccacccttgccagtgactccaagtggaactacttagctcgcgtgtgcctggagggtgcgggaagtccagcgactctcagacgcacctcccagaggaccggtgggaattgttcatagtgccaaagtcctactactgcgttttcagtgggtccttgtacatagtttgctcctctgccctagccctcacctcttgctatactggaaccgatttgtacaatgtgggaattttgttacctttttaatcaagggcaacttccttttccagcactaccattgtaaggtttttttcaggagggagggctaaccaccttgcttttctcttttctctttttcttttttttatttttgttttattaatttggggaaaggggtgttagcattagtgccatgatatctactggattttaagtagggagactttatttttaaaggtaggttgaaatttgggagatttctcggcaggaagggctgaaatccaggcccctgtctcaacttggagagaggtgacagacggcagatcttccaaatcaaattcctttccagttcttcccctggctgcctttttgggggtccctgccttagccccacacaaggctttctgaactgccaagaggggatctggcttctcaactgctcggcctcttgggccaggctgtgcccagccagccctgggagaactgggtagcaggtggctgacttctttaagcacctttctaaataccagcagaagaggctcccgcctctgttagcatgatcagtactattgtgacattaaaacaacaacaataagatcttcctatctggagggtacagaggtgaatggctttggttttcatttctcttcttcactgccttttctcggtgtggtatttgacaagattttagctcaaagcctcaccatgaattgattttttttgtttgtgtgtgtgtttgttttgggacaattttagatacctgagtgcactttttcagttagtcctaacttttaaaagaaggaaaaccaagagacatatctggtgtacgtgttgcagtatgaactctggttgcaatccctccccctcccacactgccccccatttgagtacgccgcacaagtcaaacgctaggaagtttgaataaaaccaatttttctaacttgttgctcatttgttgtaactcaataaagcaaagactaaacatttttat

SEQ ID NO: 138 - DNA, 1393 bp, Homo sapiens
ccttctcttcgtgggctatctactcagttgatccctccctcgctggcttggctctgactcctgctcagacccatcacctttgccggggaatgatgtctggagaacccctgcacgtgaagacccccatccgtgacagcatggccctgtccaaaatggccggcaccagcgtctacctcaagatggacagtgcccagccctccggctccttcaagatccggggcattgggcacttctgcaagaggtgggccaagcaaggctgtgcacattttgtctgctcctcggcgggcaacgcaggcatggcggctgcatatgcggccaggcaactcggcgtccccgccaccatcgtagtgcccggcaccacacctgctctcaccattgagcgcctcaagaatgaaggtgccacatgcaaggtggtgggtgagttattggatgaagccttcgagctggccaaggccctagcgaagaacaacccgggttgggtctacattcccccctttgatgaccccctcatctgggaaggccacgcttccatcgtgaaagagctgaaggagacactgtgggaaaagccgggggccatcgcgctgtcagtgggcggcgggggcctgctgtgtggagtggtccaggggctgcaggagtgtggctggggggacgtgcctgtcatcgccatggagacttttggtgcccacagcttccacgctgccaccaccgcaggcaaacttgtctccctgcccaagatcaccagtgttgccaaggccctgggcgtgaagactgtggggtctcaggccctgaagctgtttcaggaacaccccattttctctgaagttatctcggaccaggaggctgtggccgccattgagaagttcgtggatgatgagaagatcctggtggagcccgcctggggcgcagccctggccgctgtctatagccacgtgatccagaagctccaactggaggggaatctccgaaccccgctgccatccctcgtggtcatcgtctgcgggggcagcaacatcagcctggcccagctgcgggcgctcaaggaacagctgggcatgacaaataggttgcccaagtgaggacggaccccttaccgatctgtgctctcctagcccaagagacccctggaggggctggagtttatccagcgcctcgtcgtatgtttggctgagcacctgtggccctgggtgcaggttaacttcttgttatcaggagcccactatgcagaggccaaaggtcggcagccagcgaggctatgaattggacctttttggtatctgtgtgactgctctgtgcccatccttagccaacttgctggcgtgacaagtgcccacaagtaacacaccaggtacccagagcagggtggacaggagagacctgaatcacagcagtgagg

SEQ ID NO: 139 - DNA, 4961 bp, Homo sapiens
ggacagcaggagcagtggtgctgtcagcgcggccgtcggagacatgggagacccggggtcggagataatagaatctgtccctccagctggccctgaggcatctgagtcaacaacggatgaaaatgaagacgacattcagtttgtcagtgaaggaccattacgacctgttcttgaatacattgatctggtcagcagtgatgatgaagagcctagcacctcttatactgatgagaatattaaacgtaaagaccatattgattatcagaaggataaagttgctttaactctggctcgtctagcccgccatgttgaagtggagaaacagcagaaagaagagaagaatagagcattcagagaaaaaattgattttcagcatgctcatgggttacaagaattggaatttattcgaggacattctgatacagaagcagcaagactgtgtgtggaccagtggctaaaaatgccaggactcaaaacaggcacaattaattgtggaacaaaaagttcattccgaagaggaggccacacgtgggtgtctgggaaaccaattttatgtcctataatgcactgtaacaaggagtttgacaatgggcaccttctcttaggacatttgaaaaggttcgatcactctccatgtgatccaacaattacactacatggacctttcttcagctcctttgcttgtgtagtatgttataaaaaatttgttactcaacaacaatatagagatcacctttttgataaggaagccacagatgatggacataacaacaaccttcttcctcagattattcagtgttttgcatgtccaaattgcttccttctttttagcagaaaggaggagtgttcaaagcatatgtctggaaagaatcatttccatcagagtttcaaactgggtgataacaaaggaattgcacatccaatatctttcccatcttttgcaaagaaacttttgatctctctgtgcaaagatgttccctttcaagttaagtgtgtggcctgccacaagacactgcgttcccacatggagctcactgcccatttcagagttcattgtcgaaatgctggacctgtagctgtagctgagaagagcattacccaggttgcagagaaattcatattaagaggttattgtccagattgcaatcaagtctttgtggatgaaaccagcacccaaaatcataagcagaattcaggacacaaagtccgagtcattaactcagtggaagaatcagtcttactctattgccacagcagcgaagggaacaaggatccttcttctgacttgcatttattgttggatcaatcaaaattttcatcacttaaaagaaccatgtctattaaagaatctagctcactggagtgcattgccattccaaaaaagaagatgaatttaaaagataaaagccatgaaggtgttgcttgtgtccagaaagaaaaatcagtagttaaaacctggttctgtgaatgcaatcagcgattcccaagtgaagatgcagtagaaaagcatgttttctcagcaaacacaatgggttataaatgtgtggtctgtggaaaggtatgtgatgattcaggggtcattcgtttacacatgagccggattcacggaggggcacatttaaataactttcttttctggtgtcggacatgcaaaaaggagttaacaaggaaagatactatcatggcacatgtgactgaatttcataatggacacagatatttttatgagatggatgaggtagaaggtgaaactttgccatcatcctctacaacattggataatttgactgctaacaagccttcatcagctattactgttattgatcattccccggcaaatagttctccgaggggtaaatggcaatgccggatttgtgaagatatgtttgattcccaggaatatgtaaaacagcactgcatgtctttggcaagccacaagtttcatagatacagctgtgctcactgcagaaagccttttcataagatagaaacattgtaccgacattgccaagatgagcatgacaatgagataaagattaaatacttctgtgggctttgtgatcttatctttaatgtggaagaagcatttctgagtcattatgaggagcaccacagcatagattatgtatttgtgtcagaaaaaactgaaacttcaattaaaaccgaagatgattttccagtaatagagaccagtaaccagttaacttgtggttgccgtgagagttacatctgtaaagtcaacagaaaagaagattatagcagatgtctccaaatcatgctggataaaggaaaactgtggtttcgctgcagtttatgttcggcaacagcacagaatttaaccgacatgaacactcatatccatcaagtgcacaaagaaaagagtgatgaggaggagcagcagtatgtaatcaagtgtggcacctgcaccaaagcatttcatgatcctgagagtgcacagcagcatttccatagaaaacattgcttcttacagaaacccagtgtggctcattttggatctgaaaaatcaaacctgtacaagtttactgctagtgcctcacatacagagagaaaactgaaacaggcaataaactattcaaaaagtttagacatggagaaaggagttgagaatgacctaagctatcagaatatagaggaagaaattgttgagcttccagatttggattacctgcgaaccatgactcatatagtctttgtagattttgataactggtcaaacttttttggtcatctaccagggcatctaaaccaaggaacatttatttggggctttcaaggaggaaacaccaattggaagcctccgctcaactgtaagatttataactacctgaacaggattggatgcttcttccttcatcctcgctgtagtaaaagaaaagatgctgctgattttgccatatgtatgcatgctggccgtctagatgaacaactacccaagcaaattcctttcaccatcctctcaggagatcaaggttttctggagctagagaatcaatttaagaagactcagaggccagctcatatactaaaccctcaccacttagagggagatatgatgtgtgccttgttaaatagcatatctgataccaccaaagaatgtgacagtgatgataacatgggtgccaaaaatacttcaataggagaagaatttatatccacagaagatgtggaattagaagaagctattagaagaagtcttgaggaaatgtaattaaagatattaccacacaacatcaagtggccttgaagagactgagataacgaattcttgagtttgttttctaaaggagaccagaaatccactattacaaatgtatttgaaaacatgtttttgctttcatatgttcaaaatttgatctttgttttgtatttttgtgctaatgtgcaaacatgtacagaagaaatagaatacatgttcatgcaaatataaattatgtattctaatataggtgtaacagtttcccagttaactttgaatttatatatttagatttaaaggattaaaaaaaaggaaagctcttgacagttgtttcccaaatagcattagttctttaattttatttgtactgtacaaatgatgctagtttatttttttagcagtgaaaatgaatataaaaaaggtgacataggtcaagttttccataaattctacttctcatgtggcactattatataatacctttgagatctttgtttatgtttattagaagagggtaatggaaactgatcatggaaacatttaaaattttatcagcaatgttctttgtgggtgccatgcatatgtaaattattgctttaattagagcagcacattgctaaaataaaaaatacaccttaatttttaagaaataatttaaatgaaacaatttccattccttttacctgcttagacttttatgtgacttgtatggtctcctggttaaagggaatggtgtcagaatatttgcataaaattatttttcataacagtccttttttatatattggtgtaaacataatattcttcaagaaataatgttgaaagcctactcaggaataatcttccttaactctttaaatttttatttcatgtgaagtgttttcagtttagttattcactgaattgtcagtttccttcatttggtattacatatttaattcttaaatattgaggccccattgtgagtaataaaaaatacgacataagtagaagactaagaagggcttgtcatattatctttgtgtatatgcttcatgttatttaaccagaaatgtcttatctctaaaaatttttagtagtaattatttaccaaacttaaaaacatttctataaatataaagcttttctttatatttaagacaaaatataaaggctagaatttggttccttctctgtaacactaaatattttagtgtgaaattgaatttttttattactatagtcttttcaatctataatttgtgtttttaatttcttgatatgtcacttctgttcctccctgcttgcattttttaaaaactagacattgtggcttgagaatttatcaatcatctttccgaaatgaccacattgtgcttttagtttgtatgtttaagtggtcaagcaaggctctaggaggtagtcactgagctggaccttaaacacatctgcaggagctcacaaaatgggagcaaaagaggcattccagaaagaagagtagttaagcagatgtgggggcagggcaagaggagacagcaccttgttgccagagattctacacaaaggtgtgatggacactgatgctctattaagaagcttttgtggtgtgtgtggtagagaataattaaggcttctgataagacaggaaagggatatttcatcatgactgttaagaaaaggtaactgggttgtttaatgttttaattgataattgtcactgatcgtatttctacttgttaaataattaaaaatcatcttaaaattc

SEQ ID NO: 140 - DNA, 887 bp, Homo sapiens
tctttggtgacttgtccactccagtgtggcatcatgtggcagctgctcctcccaactgctctgctacttctagtttcagctggcatgcggactgaagatctcccaaaggctgtggtgttcctggagcctcaatggtacagcgtgcttgagaaggacagtgtgactctgaagtgccagggagcctactcccctgaggacaattccacacagtggtttcacaatgagagcctcatctcaagccaggcctcgagctacttcattgacgctgccacagtcaacgacagtggagagtacaggtgccagacaaacctctccaccctcagtgacccggtgcagctagaagtccatatcggctggctgttgctccaggcccctcggtgggtgttcaaggaggaagaccctattcacctgaggtgtcacagctggaagaacactgctctgcataaggtcacatatttacagaatggcaaagacaggaagtattttcatcataattctgacttccacattccaaaagccacactcaaagatagcggctcctacttctgcagggggcttgttgggagtaaaaatgtgtcttcagagactgtgaacatcaccatcactcaaggtttggcagtgtcaaccatctcatcattctctccacctgggtaccaagtctctttctgcttggtgatggtactcctttttgcagtggacacaggactatatttctctgtgaagacaaacatttgaagctcaacaagagactggaaggaccataaacttaaatggagaaaggaccctcaagacaaatgacccccatcccatgggagtaataagagcagtggcagcagcatctctgaacatttctctggatttgcaaccccatcatcctcaggcctctc

SEQ ID NO: 141 - DNA, 1198 bp, Homo sapiens
tactaagagtctccagcatcctccacctgtctaccaccgagcatgggcctatatttgaagccttagatctctccagcacagtaagcaccaggagtccatgaagaagatggctcctgccatggaatcccctactctactgtgtgtagccttactgttcttcgctccagatggcgtgttagcagtccctcagaaacctaaggtctccttgaaccctccatggaatagaatatttaaaggagagaatgtgactcttacatgtaatgggaacaatttctttgaagtcagttccaccaaatggttccacaatggcagcctttcagaagagacaaattcaagtttgaatattgtgaatgccaaatttgaagacagtggagaatacaaatgtcagcaccaacaagttaatgagagtgaacctgtgtacctggaagtcttcagtgactggctgctccttcaggcctctgctgaggtggtgatggagggccagcccctcttcctcaggtgccatggttggaggaactgggatgtgtacaaggtgatctattataaggatggtgaagctctcaagtactggtatgagaaccacaacatctccattacaaatgccacagttgaagacagtggaacctactactgtacgggcaaagtgtggcagctggactatgagtctgagcccctcaacattactgtaataaaagctccgcgtgagaagtactggctacaattttttatcccattgttggtggtgattctgtttgctgtggacacaggattatttatctcaactcagcagcaggtcacatttctcttgaagattaagagaaccaggaaaggcttcagacttctgaacccacatcctaagccaaaccccaaaaacaactgatataattactcaagaaatatttgcaacattagtttttttccagcatcagcaattgctactcaattgtcaaacacagcttgcaatatacatagaaacgtctgtgctcaaggatttatagaaatgcttcattaaactgagtgaaactggttaagtggcatgtaatagtaagtgctcaattaacattggttgaataaatgagagaatgaatagattcatttattagcatttgtaaaagagatgttcaatttcaataaaataaatataaaaccatgtaacagaatgcttctgagtaaaaaaaaaaaaaaaaaaaaaaaaaaa

SEQ ID NO: 142 - DNA, 191 bp, Homo sapiens
agaagagacccaaatcattctgaaggctcaactactttactggaaggttatacctctcattacccacacacgaaggaaagcaggaccttcatcccagtgacctcagctaagactgggtcctttggagttactgcagttactgttggagattccaactctaatgtcaatcgttccttatcaggagaccaaga

SEQ ID NO: 143 - DNA, 926 bp, Homo sapiens
ggggcccattctgtttcagccagtcgccaagaatcatgaaagtcgccagtggcagcaccgccaccgccgccgcgggccccagctgcgcgctgaaggccggcaagacagcgagcggtgcgggcgaggtggtgcgctgtctgtctgagcagagcgtggccatctcgcgctgccggggcgccggggcgcgcctgcctgccctgctggacgagcagcaggtaaacgtgctgctctacgacatgaacggctgttactcacgcctcaaggagctggtgcccaccctgccccagaaccgcaaggtgagcaaggtggagattctccagcacgtcatcgactacatcagggaccttcagttggagctgaactcggaatccgaagttgggacccccgggggccgagggctgccggtccgggctccgctcagcaccctcaacggcgagatcagcgccctgacggccgaggcggcatgcgttcctgcggacgatcgcatcttgtgtcgctgaagcgcctcccccagggaccggcggaccccagccatccagggggcaagaggaattacgtgctctgtgggtctcccccaacgcgcctcgccggatctgagggagaacaagaccgatcggcggccactgcgcccttaactgcatccagcctggggctgaggctgaggcactggcgaggagagggcgctcctctctgcacacctactagtcaccagagactttagggggtgggattccactcgtgtgtttctattttttgaaaagcagacattttaaaaaatggtcacgtttggtgcttctcagatttctgaggaaattgctttgtattgtatattacaatgatcaccgactgagaatattgttttacaatagttctgtggggctgtttttttgttattaaacaaataatttagatggtgaaaaaaaaaa

SEQ ID NO: 144 - DNA, 484 bp, Homo sapiens
gcggccgccgggcgcagctttcgctcgggttgccggccctgaccccgcccaggctcatgcggccctgtgtccctaggtcaccgcggaggaggccaaggagccctgggagagtggctacgctttgtcgctgacgcactgcagccacagcgcctggaaccggcactgccggctggcgcaggagggtaaggactgcctgcaggggctgcggctgcggcaccactacatgctgtgcggcgcgctgctgcgcgtgtggggccgcatcgccgccgtcatggccgacgtcagcagcagcagctacctgcagatcgtgcggctgaagaccaaggacaggaagaagcaagtgggcatcaagatccccgagggctgcgtgcgccgggtgctgcaggagctgcggctgatggatgcggacgtgaagcgcaggcaggcgcccgccctgggctgccccgccccgcccgccccgcgcccgctggcgctgccttgcggc

SEQ ID NO: 145 - DNA, 5701 bp, Homo sapiens
ctgcccaccatctttgtccctggcaaagtgggttttgcgcagtggcttagacctagaaaagaatcgtgacgggcaggaaaccattacaccaccacctgggctgtgctctccggctcccgccgccacccccgccctcgccttcgcctccgctccggtgcacattaaagatccaaagtcatgactgactccaagtatttcacaaccaataaaaaaggagaaatatttgaactaaaagctgaactcaacaatgaaaagaaagaaaagagaaaggaggctgtgaagaaagtgattgctgctatgaccgtggggaaggatgttagttctctctttccagacgtagtgaactgtatgcagactgacaatctggaactaaagaagcttgtgtatctctacttgatgaactacgccaagagtcagccagacatggccatcatggctgtaaacagctttgtgaaggactgtgaagatcctaatcctttgattcgagccttggcagtcagaaccatggggtgcatccgggtagacaaaattacagaatatctctgtgagccgctccgcaagtgcttgaaggatgaggatccctatgttcggaaaacagcagcagtctgcgtggcaaaactccatgatatcaatgcccaaatggtggaagatcagggatttctggattctctacgggatctcatagcagattcaaatccaatggtggtggctaatgccgtagcggcattatctgaaatcagtgagtctcacccaaacagcaacttacttgatctgaacccacagaacattaataagctgctgacagccctgaatgaatgcactgaatggggccagattttcatcctggactgcctgtctaattacaaccctaaagatgatcgggaggctcagagcatctgtgagcgggtaactccccggctatcccatgccaactcagcagtggtgctttcagcggtaaaagtcctaatgaagtttctagaattgttacctaaggattctgactactacaatatgctgctgaagaagttagcccctccacttgtcactttgctgtctggggagccagaagtgcagtatgtcgccctgaggaacatcaacttaattgtccagaaaaggcctgaaatcttgaagcaggaaatcaaagtcttctttgtgaagtacaatgatcccatctatgttaaactagagaagttggacatcatgattcgtttggcatctcaagccaacattgctcaggttctggcagaactgaaagaatatgctacagaggtggatgttgactttgttcgaaaagctgtgcgggccattggacggtgtgccatcaaggtggagcaatctgcagagcgctgtgtaagcacattgcttgatctaatccagaccaaagtgaattatgtggtccaagaagcaattgttgtcatcagggacatcttccgcaaataccccaacaagtatgaaagtatcatcgccactctgtgtgagaacttagactcgctggatgagccagatgctcgagcagctatgatttggattgtgggagaatatgctgaaagaattgacaatgcagatgagttactagaaagcttcctggagggttttcacgatgaaagcacccaggtgcagctcactctgcttactgccatagtgaagctgtttctcaagaaaccatcagaaacacaggagctagtccagcaggtcttgagtttggcaacacaggattctgataatcctgaccttcgagaccggggctatatttattggcgccttctctcaactgaccctgttacagctaaagaagtagtcttgtctgagaagccactgatctctgaggagacggaccttattgagccaactctgctggatgagctaatctgccacattggttctttggcctctgtgtatcataagcctcccaatgcttttgtggaaggaagtcatggaattcatcgtaaacacttgccaattcatcatgggagcactgatgcaggtgacagccctgttggcactaccactgcaacgaacctggaacagcctcaggttatcccctctcaaggtgatcttctaggggatcttttaaaccttgacctcggtcccccagtcaatgtgccacaggtgtcctccatgcagatgggagcagtggatctcctaggaggaggactagatagtctggtgggacaatccttcatcccatcatcggtgcctgcaacctttgctccttcacctacacctgctgtggtcagcagtggactgaatgacctgtttgaactctccacagggataggcatggcacctggtggatatgtggctcctaaggctgtctggctacctgcagtaaaggctaaaggcttggagatttccggaacatttactcaccgccaagggcacatctatatggaaatgaacttcaccaataaagctctgcagcacatgacagattttgcaatccagtttaacaaaaatagctttggtgtcatccccagcactcctctggccatccatacaccactgatgccaaaccagagcattgatgtctccctgcctctcaataccttgggcccagtcatgaagatggaacctctgaataacctccaggtggctgtgaaaaacaatatcgatgtcttctacttcagctgcctcatcccactcaatgtgctttttgtagaagatggcaaaatggagcgccaggtcttccttgcaacatggaaggatattcccaatgaaaatgaacttcagtttcagattaaggaatgtcatttaaatgctgacactgtttccagcaagttgcaaaacaacaatgtttatactattgccaagaggaatgtggaagggcaggacatgctgtaccaatccctgaagctcactaatggcatttggattttggccgaactacgtatccagccaggaaaccccaattacacgctgtcactgaagtgtagagctcctgaagtctctcaatacatctatcaggtctacgacagcattttgaaaaactaacaagactggtccagtacccttcaaccatgctgtgatcggtgcaagtcaagaactcttaactggaagaaattgtattgctgcgtagaatctgaacacactgaggccacctagcaaggtagtaactagtctaacctgtgctaacattagggcacaacctgttggatagttttagcttcctgtgaacatttgtaaccactgcttcagtcacctcccacctcttgccacctgctgctgctatctgtccttacttgtgggcttctccatgctgtgccaatggctggctttttctacaccctcttttgagtgtagtttggtattttgtaattgagagctcatttcaaaagcagaaaaagacaacaaatattaaagcaaggaaaagtgtaactgaaacactgcactttactgttttatacttttgtacatatgagaaatcaagggattagtgcaaccagtagaaggcattgaaatgactgtcattaaccacacagtcctggaggcagagatgcagttacctaccctagcttttgatgggttctcttacctgtagtagccttatccctggtcatttggattttcagtttgcttttttctttttttcccctccaaactccttttccttggccaagccttcatgcttccccctttccatattataatctcatttgattgctctgcagttgggaacggtgatcttcttgaatgatgtttcagtgtgcaaaaactatagagcctgtcagcaccaaagctgacagaagttataccttactcctttcctttcccctgaacaaacctgctaatcccactaattcaggaatttgagtagagatggggaacaagaacccagatgctgtcccctcaccccctctcctgtatttctcaggtccagttcaaatctaaaattctacttttagagttgaaacagagtaataacttatctaaccctcttttcctacaaaggagaaagataaaaggcacaaaggttaccgccaaggcccgtcagctgtgtagtggcaaagccgagaccgagtctcctaagtccccgtcagtgtggttttcaccacaggactgtctcttgtcgttttcccctaatgccttctcctgccttttctgtgcctagtttttggctcttcacatattccatattgattttgacgctctgtatattggcatcaggtggcagctgaatatcttttgaattactcgaaggtaaagccagatgccagaatgaaggtgtagccagtgtttcccatatgcccctggagccccacttattgaggccagcagaataggtgcagagatgaagtgagcttagagatgttgcaaatgctctttatcccttcagctctctgatctgctctttcttcatgatacttagtctgcagggcatattaagatcatcccagaggttcaggcagttcctgtcatctctgaaaagactgggggatatgaaatcttccccctaccccacttaatgcgttggatatgatttttcaaagaatgcttcatgcccaaaataccagcctgtttagcagtgttacactgtttgatctgcgggcacttgttgcattgcctggcacccaatattcagggtccatgactaagactggtcttctcagatgccctgcttaaatcaggggcacttcaggctccacaggcgtcatgttggactgagacctaactcactggactcagaggaggaatcgtggaaaacaagagcaaaactaccccacacccctatttcatgtctgaaataaccctgtttcataccagttgcaaagcttgtggggagcggtcccacaaagcactttcttaaaccttgagaatctccaagagaaaaatatttggggaaggagggaggaaatatgtcccttgcacaccacccctgaagcacatggcagtaggaaacagcataggattgtatgtgggaggtggataggtcggtgatgtgtggagcggaaaagcaggttggtaaagttcccttcttgggacttattcctggagtcagtggatacaagtagtgcagaaggttcacactgcaaatagtgttctcatctcaaagcaaactatcattccagaaggaaaagtgtgtcagggcaagcagacaacacaatttcctatcagaatatgtccctcaacccccgaaacaaggcttctctcagcctccccaccagtgatggataacagctcctattctcagctgacctgactgagccaacccatgaactcttcactccttggggaagccacctcccatcacacccctgagcagagttagggaggaattctacttcccataaaaggacctctcctgagaggcaaaacctgttgcctccaccacggcttccctcttggctcattccaagcttggccaaattggggaagtgggatggaggttgccctgcatcccccctcctctgcctgagtgtgtctttgtaatgtcagctggcatcatacaaagagcaggagaagcaaacacccagaactcttttgctggtcagagattccctgagtgtctgtcctcacccaagcctgctctgtgtctgtgttgtgaagcttgagactctggaaagaaatggggagggggggcaggggaaatgttgccctaagaatgcttctcattcctctgttcttattgggtcctgtttttcgggagggtgggggttgggggaagcttgaccttgtgtcttcgtcaataaactcacatttacac

SEQ ID NO: 146 - DNA, 2303 bp, Homo sapiens
cccggcgtcccgtcgagcccagccccgccgggggcgctcctcgccgcccgcacgccctccccagccatgtcgtccatcctgcctttcactcccccgatcgtgaagcgcctgctgggctggaagaagggcgagcagaacgggcaggaggagaaatggtgcgagaaggcggtcaagagcctggtcaagaaactcaagaagacggggcagctggacgagctggagaaggccatcaccacgcagaacgtcaacaccaagtgcatcaccatccccaggtccctggatggccggttgcaggtgtcccatcggaaggggctccctcatgtcatctactgccgcctgtggcgatggccagacctgcacagccaccacgagctgcgggccatggagctgtgtgagttcgccttcaatatgaagaaggacgaggtctgcgtgaatccctaccactaccagagagtagagacaccagttctacctcctgtgttggtgccacgccacacagagatcccggccgagttccccccactggacgactacagccattccatccccgaaaacactaacttccccgcaggcatcgagccccagagcaatattccagagaccccaccccctggctacctgagtgaagatggagaaaccagtgaccaccagatgaaccacagcatggacgcaggttctccaaacctatccccgaatccgatgtccccagcacataataacttggacctgcagccagttacctactgcgagccggccttctggtgctccatctcctactacgagctgaaccagcgcgtcggggagacattccacgcctcgcagccatccatgactgtggatggcttcaccgacccctccaattcggagcgcttctgcctagggctgctctccaatgtcaacaggaatgcagcagtggagctgacacggagacacatcggaagaggcgtgcggctctactacatcggaggggaggtcttcgcagagtgcctcagtgacagcgctatttttgtccagtctcccaactgtaaccagcgctatggctggcacccggccaccgtctgcaagatcccaccaggatgcaacctgaagatcttcaacaaccaggagttcgctgccctcctggcccagtcggtcaaccagggctttgaggctgtctaccagttgacccgaatgtgcaccatccgcatgagcttcgtcaaaggctggggagcggagtacaggagacagactgtgaccagtaccccctgctggattgagctgcacctgaatgggcctttgcagtggcttgacaaggtcctcacccagatgggctccccaagcatccgctgttccagtgtgtcttagagacatcaagtatggtaggggagggcaggcttggggaaaatggccatacaggaggtggagaaaattggaactctactcaacccattgttgtcaaggaagaagaaatctttctccctcaactgaaggggtgcacccacctgttttctgaaacacacgagcaaacccagaggtggatgttatgaacagctgtgtctgccaaacacatttaccctttggccccactttgaagggcaagaaatggcgtctgctctggtggcttaagtgagcagaacaggtagtattacaccaccggcaccctccccccagactctttttttgagtgacagctttctgggatgtcacagtccaaccagaaacgcccctctgtctaggactgcagtgtggagttcaccttggaagggcgttctaggtaggaagagcccgcacgatgcagacctcatgcccagctctctgacgcttgtgacagtgcctcttccagtgaacattcccagcccagccccgccccgttgtgagctggatagacttgggatggggagggagggagttttgtctgtctccctcccctctcagaacatactgattgggaggtgcgtgttcagcagaacctgcacacaggacagcgggaaaaatcgatgagcgccacctctttaaaaactcacttacgttgtcctttttcactttgaaaagttggaaggactgctgaggcccagtgcatatgcaatgtatagtgtctattatcacattaatctcaaagagattcgaatgacggtaagtgttctcatgaagcaggaggcccttgtcgtgggatggcatttggtctcaggcagcaccacactgggtgcgtctccagtcatctgtaagagcttgctccagattctgatgcatacggctatattggtttatgtagtcagttgcattcattaaatcaactttatcatatgctcaaaaaaaaaaaaaag

SEQ ID NO: 147 - DNA, 1428 bp, Homo sapiens
ggcacgagggagcccagagccggttcggcgcgtcgactgcccagagtccgcggccggggcgcgggaggagccaagccgccatggcctaccacagcttcctggtggagcccatcagctgccacgcctggaacaaggaccgcacccagattgccatctgccccaacaaccatgaggtgcatatctatgaaaagagcggtgccaaatggaccaaggtgcacgagctcaaggagcacaacgggcaggtgacaggcatcgactgggcccccgagagtaaccgtattgtgacctgcggcacagaccgcaacgcctacgtgtggacgctgaagggccgcacatggaagcccacgctggtcatcctgcggatcaaccgggctgcccgctgcgtgcgctgggcccccaacgagaacaagtttgctgtgggcagcggctctcgtgtgatctccatctgttatttcgagcaggagaatgactggtgggtttgcaagcacatcaagaagcccatccgctccaccgtcctcagcctggactggcaccccaacaatgtgctgctggctgccggctcctgtgacttcaagtgtcggatcttttcagcctacatcaaggaggtggaggaacggccggcacccaccccgtggggctccaagatgccctttggggaactgatgttcgaatccagcagtagctgcggctgggtacatggcgtctgtttctcagccagcgggagccgcgtggcctgggtaagccacgacagcaccgtctgcctggctgatgccgacaagaagatggccgtcgcgactctggcctctgaaacactaccactgctggcgctgaccttcatcacagacaacagcctggtggcagcgggccacgactgcttcccggtgctgttcacctatgacgccgccgcggggatgctgagcttcggcgggcggctggacgttcctaagcagagctcgcagcgtggcttgacggcccgcgagcgcttccagaacctggacaagaaggcgagctccgagggtggcacggctgcgggcgcgggcctagactcgctgcacaagaacagcgtcagccagatctcggtgctcagcggcggcaaggccaagtgctcgcagttctgcaccactggcatggatggcggcatgagtatctgggatgtgaagagcttggagtcagccttgaaggacctcaagatcaaatgacctgtgaggaatatgttgccttcatcctaactgctggggaagcggggagaggggtcagggaggctaatggttgctttgctgaatgtttctggggtaccaatacgagttcccataggggctgctccctcaaaaagggaggggacagatggggagcttttcttacctattcaaggaatacgtgcctttttcttaaatgctttcatttattgaaaaaaaaaaaaaaaaaaaa

SEQ ID NO: 148 - DNA, 134 bp, Homo sapiens
cagaacgaatgttcaatgcagagaatggaaagtagcgcatccctgaggctggactccagatctgcaccgccggccagctgggatctgactgcacgtggcttctgatgaatcttgcgttttttacaaattggagc

SEQ ID NO: 149 - DNA, 136284 bp, Homo sapiens
gatctcccctcctcagcctcccaaagtgctgggcttacaggcatgaaccaccgtgcctggccgaattaatgtgtttttaaaccaaaatcctgacatttatttgaaacaaactaggcaatccttcacagtgcttctaaaagcccagaccaagccctccttttagaagagcaagtctcatgagcagcgtgaggtcagagatgatcaggtccatgcacatttgtgtctttccacaatgtctgactttcttgaagtaatctcaatcacaaaagccacgagctgcacggagttcctaaggaggcagtttgcctcagtgcttcccatttgctcgatagtcagagctgcagtcacacaggctcaagccactccacaagtcagtcaatgtggcagatcatacataatagtatacttaaaatataaatgttatagattaaacatgccacaacaaagtaatattgaacatcaaaagaagaaggataggaagaaagggttaatgaatcaattcagggagagcgactaaggcaaaaagaatctcctggtctgcgccaggcagtccgagagccttcagtggcagatgccaggtgattatcatgattaacagcaagatggtgtagttaagacggccatttcaagctgcgcaagtcctgttctttttatagccacagtcctctagtgaggactgagagtggaaaagtgtgcttgttgatgtcctcatctggttggatgcagtctttatttattaagcaaacatcttgtccctgttcgcaaagtgccctatgaaatataagatggagtctctaagatggagttacttatgtcaaggggcttgacacagcaaaagaacagatttttatatattaagagtctaatatttacatttttagatagtggtgtggcagagtgtaggtgaaaaacacctttttttttttttgagacggagtctcgctctgtcacccaggctggagtgcagtggcgcaatcggctcactgcaacctccgcctcccaggttcaagcaattttcctgcctcagcctcctgactggctgggattactggcgcctgccaccacgcccagctaatttttttttgtatttttattagagatggggtttcaccatagtggccaggctgctcttgaactcttgacctcgtgatccgcccgcctcagccttccaaagtgctggcattacaggtggcagccaccgcacccagccagaaaaacaccttttaagatgagaatgcaagaaatgaaaatgttatgtccacacaaaaatatgtacagaaatgttcataccagcactattcataatagccaaaaagtagaaacaatccaaatgtccatcaaatgataaacggataaataaaacatagtaaatccataaaatggaatattatttggcaattaaaaaaatgaagcactcatagatgctacaatatgtaagaatcttgaaaatattatgctaagtgaaagaagccagtcacaaaagaccacatactatattattccatttaaatgaaacatgcagagtaggcaaatcttagattcatgatggcctagggctggggactaggttaagaaagaaatggagagtggctgctgataggtacaggtttccctttggggtgatgaaaatgctccaaaattgattgtggtgatggttgcgcaattctgtgaatatacaaaaaaaatttactcgtacactttaaatgggtggtttttacggtatgtgaattatatctcaataaagctcttattttaaaaaagagagagaagaaaaaaggaagaaggaagaaaaaaaaaggaggaggatgagggcaaggacaagaagaagagagaggaggaggaggaagaaaaatgaggaggaggagaaagggacgaggaggaaagctgggcatggtgatgtgtgcctgtagtcccagttactcaggaggcagaggccaccctgggcaacataatgatatgccgtctctaaaataaataaacaatgaagaaggcagtgtgaacgaccaactgtgtcaaacaccgctgagaggtcatgtaagacaaggactaagaatggaccattggatttttttgtggggtaaaatatacacaaaacttaccatttagccatttttaggtgtacagttcagtagcattaaatacattcacactgttgtgcaaccatcaccaccaaccatctccagaagttctcacctttcccaataaaaagtgcagtggcgcaatcttggctcactgcaacctccacctcctgggttcaagcgattctcccacctcagcctcacgagtagctgggattacacgcacatgccaccacacccagctaatttttgtatttttagtagaaatggggtttcaccacgttggccaggctgatctcaaactcctgacctcaggtgttccacccgccttggcctcccaaagtgctgggtttacaggcgtgagccactgcacccagcccgatatatctattttctatgtctacaaatataacagtctcaaagcatactcaaatacggggggaattaggcaggagggtttgacagaggagtaaagaaatttgagctaaaagaccaagaatgagtttgtatctgtctgctagtggtctgtttcctgaagcccgtaactcaggaactcctgaaagtataaactggtttggttttttgtttttagttgttattgttgttgttttcagacaaggtctcactctgttgcccagactggagtgcagtggtgcaatcacgactcactgcagcctcaacctcctgggctcaagagatcctcccgcctcagcctccctagtaactgggactacaggcatgcgttaccatactcggctaatttttgtattttttgtacagacagggcttcgccatgttgccccggctggtctcaaactcctgagttcaagtgatcctcctgccttggcttcccaaagtgctgggtttacaggcatatgagccaccacacccggcacaaactggttttgaatatgaacggaataaagattttcaaggaaaacaaattttcatttagtattcagaactcatctttaaagtcttccatgtgattttcaaccatgataggcaaatatgggctttaaaaagaaggaagaggaaagtgaccagtggttctgagcccttgttttaaaaagtcaatcacaggtaagtgagcaaatggacaagagatttaagtaattttcaaagttggggcatttgctattttatcagtgtctcagaaggctgtccaaaggctatagatttaaacaaataacatggagtcctcgagatactggcatttccatttttaagggtaaacatctgaaaatgatgatgttcaaattaagagtctggtagcagtttacagttacatatggagtcgaaagaaagaaaataccatctctgttcttacgtacagattatttattgtaaaaatgtaagcaattacaaattgatctgttgtgaaatcagtgctgaattaacattaatgtaactccagtgaaaaaaatgaatttgatcaattattatcaggaataaacattaagccatgacggtgctcaagttatcttctgatgacactgctgtattaaatgtacttttcctatgagaaccttagaaaaataaaaatttctgagtagatcatctttatcttttctttttatatatttatagccatattttaatataataggccatgaggtgatatgtaaacatacataatttcaacaaattttgtcaaataaaatcatatttctagctagaaacttgccttctaatcattttaaatgaataatccaatcatccgtcaaaacaaattttttttttaaatgactgttaaatcctaaccttcattttcccctggggaaatagcattaaaattgttacacaatctgctatagaaagtgggattctctattttgaagccactagcttgcatttgcacatctagcacaggagaatcttcatccagtgatgagcgggttacacggatgaacgctaagcttcgctgcacaggtgcagggccccggcctcacagatttgccttctcccttgccgccaagtgagatccggactgcacaaaggtgtgaatcgcattctgttttaaaagaacaagatgagcaggttaatcacctcatgggcagcaacgtgatatttactcagttttaatatgtatgcaaatgaaaataataattcagaattcattcactttaactgtcttaaattgcccagcgctaaaatgaagagtatgtgttttgccagtgaattctttatctctcaaatgaatttctgcacagctgcctaagaaatctaacagtggcaggtaatggcccctgcagactgtaatgctaagtggtaactaagtcatgcctactccaacccagcacacacagcctctgcatggccaggctgctcccagcttaccttaggcttctcagcattgtacttgtccagaagagcctggatgtggctcccgtagtcagggtggacctcagtgaagttcttgacctaaggccaaaggaaaataaatgcaagcattactctaactccctactatatcactccccagggactgtggtttcccagtgtttattccataggggaggaaagacgtttcagcaggaggcagtactacaggtgtttaacaatgccagcctcagagttaagatgcaggtccagtgaacactctgacatatactggctgagcaacctcggataggtcacttaacttactgagcttatgtccctctgccgaaatgcgcaagaaaatgacacctaatcagtataattttaaaaatactatttggtctttgtcccccattcctgacacagatctaaaacccttcgaatgtactgtcttttatatactactaagatgattcatgggggcctacatagattcctgatggaggctcacaccaggaagaacaagcacgcgatcagaaggttagaacttctagccccacccccaaacctccagggatgggagaggggctggagattgtattcaatcacccatagccaataatttcatcaatcatgcctatgtcataaaacctccagaaaaacccacaactggcaaggtcagggagtgtctggattagtgcacacatccaggagctagaagggtggtccactcagggaggcacagaagctccgaggccttcccccatgcccctcttccatttgtctattcctgagttgtattctttataataaattggtaatcataagtaaatcattttcctgagttctatgagtctttccagcaaattatcaaacctgaggaaagggtttgatttgcagtcagaatctgcagaagtgtgcatagccagggtacctcatttgttatctaaagtgggaaatgacccctaaatctttgggttctgactctagctccaggagctactgttagaattgaattgagttataggacacacagttactgtcaaagaattacagaattgcttattgtcggggaaaaaaacccatacaacctaggccaggcgcagtggctcacgcccgaaatcccagcactttgggaggccaagatgggtggatcacctgaggtcagtagttcaagaccagcctggttaacatggcaaaaccccatctctactaaaaacacaaaaattagtcgggcatggtggggcatgcctgtagtccaagctactggggaggctgaggcaggaaaatctcttgaacccaggaggcagaggttgcagtgagccgagatcatgccactgcagtccagcctgggtgacagaacaagactccatcttaaaaaaaaaaaacccacacaacctacctcacaggatgctgtgagaaaaatgctgagaagtgaggtgcatttactgcatgaaaagagctgacctcagagtaagcgcttaacaaattacagtgatttacattgagaaacgggcccagacacagcctaaagttaatgtgaaggatacaagaacactggtacatgcagcacaactccacacacttcaggcaggaattccccagtggacagcaagaggaggcagggcattgggaacccataaaagccttacagtttcagcatatgtgaaaggagaatgccaagggttccagcccagttctgctatttacaagctgtcgtatccattctctccagtaaaaggagataaatcctgccctgcctaccacacagagcgcctgtcaagctctctgctgatactggaacccaggctctgggacacagcccagacagctgctagcccagctgcccctaggaactgagaagcagcaactaggggccaaggaaaaagggggatttctagatttgcaaaaagcttagctctgggacaggccaggaaaccagaagtgagagggcttcactcagctcgatgagcggccatcagaaataccccagcaccttagcatgaaagtctagcctgccttttggaagcattgcagttcttattccagaaatcatgcaaatttctagtctgcatctgaaggaggatcgaggtattatgacattaagcctttaggcaggttttaaaccataaaaatgcaaaaaagaaagacagactgattgactgattgactgattttagagacagggtctccctatgttgtccaggctggccctgtattcctgggctcaagcgatcctcccatctcaacctcctaagtagctaggactacaggtgcatgccatcacaccggctgatatatttattatcatccaaagtttaagtagaattgcagcaggactcacattttgatattgcacatttactatcttgcacagaacttggctgcagctgaattaaacagaataggacaaaattcagtctgaacacaactaaattagtacacactggacaaacagctaaggacgatggatatgccagaccagataaaacatggaaagaaaataatcagaagttggttggggattactagtttatttttttttttttaagttctcttaagtcaagtaaaacagaaatggcactttctttttagggttctcccacacagctgcactgtcttccttagccagcagaggacacccttcagcttacaaagactcaccgctttcttctggatgaaaatttgtgcatccttcaggtggccggcaatgttctcacacagacgtttcctctgttcctcattcagcacgttcacatagaatgcccgcacctgctcagagaaaagagcaagtgcagagaattgaatcaccagtttatcaccaacaaaattcacctactacaacacttaggaaatcaatgataaaaaaaactttagaagttaagaataattttaaattttaaatttgggttgtgtccttcactttttgttttaagcaaaataagtaaaattcatttgttaatagctcatacctgctttctaataatatcctttatagtaactgctataaatctcttataaatagatctacaatttaaaacctcaccacattcttaatactgacaagtctaaaatgtgcaagctgcctttgaatgtaaacttagcacaatacctttgttcaattctcccagaaccatggaggaaaattaactaatttagctagagatataatttgatatatagataattatatctatatatagacatctaaaaaactacctcatttatacatgtgtatctgtagttattcagaagccaatatttcttaagcaagacatattaatagtgatattttgctagattattgggttgacctctaaaataaatatccataaattaaaatgaaaaataggagcttagtatcagatatgtgaatccgagcagcctctgccccattctgaaatcaaaaggttgtagctatgattttattcttacatttcattcattcattccactcattcaacaaatattgagtatctataatgtgcgagactctgttctacgtgctgttctattaatgtttatgaagtccaataatatccaattatccaaagtatcaacttcataaaatattaagagatgcatcatttccataagtcatcaaatatcaggctataattatgtttttaaatttttgagtaaagtttaaacctgataccaaagttaatcagacattttcgattaacacaatctaatcaaagtactatatcctggggatttcctcagacctatctccaattcactaattctctcttcagctgtatttgacatattgcgtgaaaacatcgactgggtcactatatctgttgactttttatttcacagattgtaatttttgtttctagaaaatattatttggttatttttcaaatctacctgtttttctcctcatatcctattgtcttaataatattccttttttgcatctctttaaatatgtatgtttattttaaagcctctttccaattatcatgtctatgattcttccatctattattgcatgtgtaatttctcattggatttccttgtatgtattctaatttttcactatgactcatcagatgaagtagtcttgataacatctattgttctatcttccaattcactaatcttctcttcagccatgttaacctcctttaaaagccatctattaaattctaatttcagttgttacattttctagttatgtccattcaactctttttctatagcttaaagttctcttactaaattcttcaagcagtcatctattttcttttttttttttttttttttttttgagacggagtctcgctctgtcgcccaggctggagtgcagtggcgcgatctcggctcactgcaagctccgcctcccgggttcacgccattctcctgcctcagcctcctgagtagctgggactacaggcgcccgccaccacgcccggctaattttttttttgtatttttagtagagacggggtttcaccgtgttagccaggatggtcttgatctcctgacctcgtgatccgcccacctcagcctcccaaagtgctgggattacaggcgtgagccaccgcgcccagcccatctattttctcaaacctattaatcagtcattttaaaacctgtatctgacagttccattatttaagcctccattaggtttgtttctactgtcagtttgtagggggttttttctccctcttgattttcagtcataaggtcttaatgtgttaggtgcctggtcatttattgttgaatgctgaacatttccatataaaaaggtctagaatcatttgagtttctattttccaccaaagaaaattttgtttgcttctgacagatggcgtagaaagagatcaccttaatccaatctgagactgagcagaggcaaagttatgtttcctgtattgtgaaagcaagtttatttcatgtttgcccttattcctaggcatggccctttaaggatttcaactgaaagccttgagtataactagaggctctgcttcttagcagaccttgaattccaatttttgtcccttcagactcatgagactgctgtaaacaccactcagcttctggaccagtgcttacaaattaacaaataccttaagaggaaaggaaaccaaatgtcaagcttacttcactgcacttttttttcctgcacttcttttccatctttgatcttggtcccttaaatccttgttgctttgttagctctccaaagccttcaaacaagtgctttatgtattttacctaccttttcaatgttctccatgaaacggtaagtaagatacaagctagtctgccatagacagatgcaagcccaagtgaatcatttttaagagaataaatctggaccttcttatgtatttcccatgtgatacatcatcacagaattatgctatgaatctataacaatagtattgtgattacttaaaaaccacactatatcctatatagtgataagaaattctctcaataagaatgagcacataataaattttcatgtgtaagcaatagcctcattaatttttgcaggggttgtatgagctggtttaatacctgtattgacctcacataggcaaaattctttgagaggcagggaatgtactgtaatatacttggtgtcatctgcatcaccaaaaataatgcagttacataaaaggtatgcaggaaatgttttaagctcatctaaaaatggtttatatcccacaataatgtaatttcttttttatatatacgtatatatgtatatacgtaaatgcttttcaagcaaagatatcctcacagcgaattaattcatgtataagtattttttacttggaacccacattcacaaactgagaaactagaaataggttctaatctaatttaaatactaagtttaacactaactgctcaaacagagctctagaacaactatacctttaactttattattttattgtgtgtggtataagttgcactggacacattaaggaggcagctgcccacctacagcccttccaagtccaagggcctccttcatagcatgtgctgaaacagctcttagggcagccataggcaactggaaagaggatgagcatttgccctggggcggttaactagagcctgaccaaggccaatggtgcaacctggggtgaaaagattagccaagtcaataggattccatctctctagaatctagagatagacatgttgagagaaggagtaaaaggtggtccaaaaaaaaaaagtaataatggagaaagacgccataaaggagagttttccattgttgtggaagagccacaaccatgataaaacagaagctctgacgcagataggagaaaacaggaagctgtggtaaaaataatcaattagcattggcaagcagaagcagacagatggagaataagccacgtgaaggacgagccctgcagtggaaacgcccacactcttgtggccgaggctcctggagctattttggatctctagttctagtccttgaacctggactgtcctgcccagattcttagatttgtctccacgtaagctgtacatgctcatttcttaaattcccatgagataactgtttccccaatgccccctccccatatcccttcaataaagtttgaagaaactgagacggagtctgcatgctttgaggcaaaagaccagagtaatataacccttcaactccacccagtaaggggcccaatttactattacagatgagtcttccttgaattcaatttaagatacatcagacagttggggcatttgcagggagggggattatgcaggcattgacaaggagaattagcaggtgacttccatagcagataaagagaagtcattacctgagtaacgttatcatcattggcagtgttgaatctccgcacttctccagaatattggatgctgtgctccagggcagaaggctgttgttccggagcaccaaagctgttggggtagtaatttggagcaccaccttcaaaacaaaaccacccagatgcacttaggaataagaaaagtcaagtaagtctgcaaataatcactgtgatgagaaataaattcaagtggtaatcaaatacacacgtacacatacacagatataaacacaacgcacacatattatttttaatttcccgcatttagctacaggtagtatgaagattcttagggaacgctgccatctgctaaatgcttgcacaggctgccgcactttatgaatgaatctcaaagtcccttttgacacttcaaagggtctcatctatcaagtcttctgaggggtacagcacatgtagaagtttatacaggcttgatttggccaccatatagggatgaggctcaaagacacatttcaaaattgacttgaaaaattgtgtcatttggacttgggctcaattcaaacactgcatcacaaaattcttgagggaaatctgaaagttctggttctgctccttgaatctacagacacaagcatggagctctgtgatgggacctgactgctgcaaggtcacacggtagccagtggtagatatggggttggaactctgggttttttgtctcctccagcccagcatatacagtatttccattacagaactctactttgctattccgtaaagtgtttttaggattctcagggtatctctcctttactgacaatgatgactttgttccattgtagcttcactttcataccctccacagaccaataaacaaagaattttttaaaatgtggtaattgtatatcagcacttacttatctggacttataagaaacagtgacaaatacaatcaaaatattttctatgacttttgaaataaattataaggcttttttttcgttttagcatatttattttctcaactatgctttggctgacattagcagaagctttcattacccgagcacacactgcctaaacaggagtggcccagaaacatattaagtggtttgagcaaaccaatctggggttggaattttagccagctcactgccgtaatagattatccacagtggataatcaagaggtgcctatgtatgacattcatcaagacaccaagtgtgtgtgtaggggaaggaagaacaccatactattatagagcccaattattcactcaacaaattcaacagatcagtcacatctacatgaaaagcaaaatgctccaaaaaccagccatcacagtgttttcttcattaagaactagctctttgaaatgtgcctagttaatttttaaaatcctacttccaaatgagccctgacctttactcaaagtggtagttgtctttaaagcactgaccacaggaacaattaagctctttcactgagcttcagggtcacagcccaaatgctctacttttacaatcaagccaggcgcggtggctcatgcctgtaatctcagcactttggggggccaaagtgggtgggtcacctgaggtcaagagttcaggaccagcctggccaatgaaaccctgtctctactaaaaatacaaaaattagctggcgtggtggcacactcctatacttccagctactcgggaggctgaggcatgagaatctcttgaacccagaggcagaggctgcagtgagccaagatcatgcactgcactccagcctgggcaacagagtgagactctgtctaaaaaataaataaatagataaataaatatagcaaaatgtaatagctatgacctttgggtgttgggactatatgggaatttttcttttttcttctttttcctatatattccaaattttctttaggacacttgtattatttttatcatagaaaaataaactttgtttgaatatagacatctgtggctataaatataaatcatcagtaaaatttctaaagggatcaatgcatgcagtctatattactaaaacacgtgtcctaaatgggaaaagaaaataactaagatctatattaaactgtggaatagtaaaaggaaaaaactttaatcaagcattctgcttgacttattagaaaaagtaattagaaccagaggctgtttgtatacgacaccaaaaaaaaagtagttaaaagaaaaagatcctaagtttgataaatgagttccaaaaaacaaaaagtggtaagttgattcacctaactttattcacttaggaaaaaatgaagggaggggaatcctttgacttgctctgcctcccctactctcttctccccagccttccctgctaattctagctcccctccaaattctagctagacctgctcctccagggccacagcagaactgcaaagagaaacagaagactccaactcttggctttcgcacttccaagggtctaagtcttggtgatttcacagtgagttaaggaattgtccattttggtgaagtgtcttcaaaacctaactcccaagctggatgttactgtactctagccagtgtgaaagatctttctccctgcttttaactactggatacaagtaacatctgaggtggaaatgctcaataaaatatataaaatagataaaaagcatggagagtcctcaggcagcctaaatcttcactgctgggcaaaaaagcgcccagttagcagcacctggggagcacctttaccaagcaggaggtcctgcggggccagcttgagagccactggcctggcctcccgcccatctgctccacgtgccctctgcccacgcagggggagcccaacgtctttaggcctaccctgattgtcctgcatgcacatcgggccgtcacgctggtagttggccactcgagcacggtagggacagttcacaggtatatgaagataattgggtcccaggcgatggcggtgagtgtcaggataggcaaaaaggcggccctgcagtaataaatacaatagacactgactaggggcagtaacatataacataggaatgggctgtaaacttcattctgaaatttgaagtacaaagcactctgtacatggttaccacaaaattctgcctttcccgctacttaagagtgaagcctctactcttatgaaacgagttctccctaactgaacagttctgaatttcccaggccctctggccaaccataaatcttcacatctgtttttggtaataatatcttttttttttccttctgcataacaagttagtgtcttgtcttatacagtattacttcctattcccaaggaagtattgcattataaaataaatgtgctagaacgttaactaactgaaatattgaattaattctattcctcctcattcccccactccagggaaggaaccaatcatttgctctttacaaaaagcaacacatttctacaaaaccaacagcatgggaaattcttcaaataagcacttccaactgggcacagtggcccatgcctattataatcccagcactctggaaggccaaggtgagaggatcgcttgggcccaggagtttgagaccagcctgggcaacacagcgagacctgtctctacaaaaaaaaaaattaaaacattagccgagcatggtggcatgtgcctgtagtcccagctactccaacaggctgaagtgggaggactgcttggcccaggggattgaggcagcagtgagctgcaatcgtgtcactgcaatccagcctgggcaacaaagcaagatcagaaaaaaaaaaaaaaaaaaaaaaaaagtaccgcccactcccatgctgccttctgaattatctcagaaacactttgagctctgagactttctagatataaacaacaataacaaaaaatctgtggttcaaaatgaaagccctacaatgccaaaggtaatcaatctaagattaaattatgttccatgttaatcaaggcaaagatggcaagcatcttgaaatttctttcagttaatgctcaaacaaaagctttatgataaattctgcattaatcttaatatctaattattgaactattctcattattcatactccttttctatgagcaatttttcttccattgaatttatcattggccttgaaccttaaaagtatttttatatccctaattctatgaggcaaaataaaaaccaaattgaatagggcaacttaagcaataactttgttccaaatcactgataccaacagacttaatccagtcccagtgttctgtcaatattttgcttttggctgaatgactccctcttatcatcatttcaaatagcctaaggtcatatttagatgactagccatgcggccatgaccaaaactcagctataggttggaagctggttgtctcctttggctcaaaaagttgtgctcttgactccatcaacaggataggagatacaatcctgccatgggcagctcctggatgtagcctctatcacctaattctgattttgtgtcaccctgtgtttatcaggcaaccttaccccacctatgggtggagaccaacaaaggttgggaaatgggcacagtgaggccataccctgacaccagcttgaatctaggccttccccaaggccctgtgcctgaactcccttgctggacctgcgtgagtgggaaagcctttcccacccaagcaaccggcccaacttctccaactcttggcaaaatgcagagaatgagagcaagaaaggctgcacctgtgtcctcaggtactcaggggacaggacagtctctctatgacttgtattatattatttgtccatttcaccatggtgtggctcaccactttggataaagttataaaacttaataacatgaccttgttaaaaggcacctgtaaacactgcccattaatatatcaaccgccactgcctaggctacaatactcatgagctctcagcaggaataaccccaaagcccccctaactggctttccacttcctgtccaacaagacaatctacatattccctactcacctactcaaaaaatctcaaatcattccttaatggtcaccaaatggctaaatgagtacaacagtccttccccaactgtatggctcctcacaggctccatggtattggaactgatagctaaatgacctaagaaggatgggggaaagctaggctagaaacaataactcgacaaacttatgaaagctctttcgaacagtttctaaaactcatttaaaaaaaaaacaacctataaagagtacactgaatttaaaatagatatatttgccagaactaaaattaatactaacagaaattatattactttctacttgtcatcctttttcagaactctcttccccactgtttgaatagctgccttagacatttgctttcttaggaatgtagagaatacgtatttgctttgcagtccttttcccgggggcctagttctccattcaaatcttcattgttcttcaaattatatgactcagtgctgctgactgcctcacggtcccactgtggttccagagacccatggtgacttggattcttgtgaaaagagtttaggtaaccttgtattcctcaatccgttccctccctgggtaaccagggttatgcagcctctgctctgcccatgacaatttcatgccttggcaaatcccattagcctcatcctctcacagttcagccaccaggtagggagttttagggcccaggattaccttgttttggcttcctctactccctggtttcaatgcaaacttctgcttttcctctgagaactgcctgactttccttttgctattcccaatccctagttgtcgctttttctatttatcaccaagaggagtgattctactcaatatatcccagaccacacttctcaaaactgaagaaagcttttcactcctactcaagcatttaaggtcccctctgacatatactcaatgaacctacccaaactctattcttctcattcaggagagagtgactgtttatagtttcaacacacctaacatgtcccacctttgtgcctatactcatgtccttctcctgccgcattttacctactaaaaatcaaaatcctatctattcttcaaaacaatctcaaatgctacctcgttcatgaaacttcgtggctgacctcctatcagacaaaattttgctttctggatcaccatggcattctgccttacattatggcacccaagacagtccaccatacacaacagacaggtactcaatttgtaacagttgaattggactaaaaactaatgaaaaacttactttctataaaagcctcagatgttccccaatgtcataagcaaaaaagttattttttaaaaacggaatcttagcttgtcctccatgcagactgaaacctgaactggaatcagatacttacataagaagtaaccttcagtcgctgtggtctgatttagggtacaatctttaacctttgtttcaaggtcacagtctaaaaccacaaaagattgatttatacagtaattattaagccaattattttcttactgattctgatccaaagtacaatttttcactcttggtactcttgaaagagatattaaaaagtgatgtaaaacatactgatggcttaacattagcaaggtgaatggttaatccactgcttttatcactggcagcatacatgtagttcataaagatcatccctagatctctttttacaaatggaaaaattcaagcatcaccatgaaacagaaaatgaggccagccacggtggctcacgcctataatccagcactttgggaggcggaggcaggcagatcacttgaggtcaggagtttgagaccagcctggccaacagggtgaaaccccgtctctactaaaaatacaaaaattagctgggcatggtggcgggcgcctgtagctaatcaagaggctgaggcaggaggatcgcttgaacctgggaggcggaggttgcagtgagccgagatcatgccactgcactccagcctgggcgacagagcaagactctgtcacaaaaaaaaaaaaaaaaaaaaaaaaaagaacaagaaaataaagttaggcttaccaaggtattataattaattaaccatacttcagctacagacagaacaaaccatgcttcactctatcaatacttaaggtatttctattatgtcttttttttttaattaagagagtaagtattcttgtcttcacatatgtagggatcttaccatggacttttgtttatacttggtttactcaaggaatgctcattgaagaatagttcacctcagtgaatcccacaaggtaaccaagcacccagattaaagtttaagtaatgttcttgttaattcctcacataaagatcatgccaagctgcatattttgtgtgtgcatgctcacatggacacctgcctcagaacatctcaatccaccaggctcacctgaagcattttgtcaggactggcctcaatgccaggtggcatgttgcttgggtcgaaggctatctgttcaacctcagcaaagtaattaactggattccggtttaagaccagtttaccaactgggatgagagggtagtccttgtgaggccaaacctgaaaatgatgtcatattcacaattaccaggcaatcaactgaaggaaatcaaagctacccacaaaaataccagatttcaaatacaatcaagccaatgaaaataatttttaaatccaataaaacataagaatttaagatgagtgccttagttaaatctttcacaatagtaagtggtaaatactgacagtttccccaggaaaaagtacatcagcttttcataatctgttccctgttaataacaatatatgaagccacatacacatactcaatgaaatgacaaacaggaacgtggaagtaagatgctggtaagcactcattcacagcttaggacactctgaagtggtaccctctgtattttgtatatgacttccccattattataattgtttgactagattttttttctaattaggtaagaagagacttaaaaaagaaaacaatatagttgtttactgactcaccttggtgagatcgaatggattaaatggaaaagtttctgcctgattaaatgtcatgacctggatgtaaaaagtccaggaggggtactttcctgtggcaatggcgttaaaaagatcccggatgccatagtcaggatcttcctgggaaagtctcgccgcatcttcaacagaaaggtttttgatgccctggtcagtctacaaaatgaaagaaagaagctccaatggaaacttattgtcaaagttatcaaaatttcatcagtaattcattgaaggattatgagtaacactgcccaaagaatgaactttctttacaacaatacttctattgttcaaatctgatactaatgaatttatcaacaagaaattctacttgattatcccaatacttttaaatgtcaagggaatcccatctacacatttcatatttaaaatcagtcctatctttccctttatgtattctattatttgaatttttacactcatgttactttccaaatcagaaaaatcaaaatatacttaaaagtaggcaaaagattaataaaattaaaggactacttgccttttatcatgaagtaatgttttaattccatttcatgacagctcaaatcaattactgagactgtgctcggccagtatcccttcacccctgtcctattccttttttttttttttttaataaatcatagaatcatagctcatagagttgaaaagaacttcagtacagccacctggaactagttctctgactatgagcaggcaaaattaatattctgactttccaagcaagacattaaaacccagagaagctgtgtcacttcataagtgctcctgttatcatatcatactgttctttgatggactgaccatgtgatcttattctcaaagacctcccaacaagccaagtgccgcagaaagatttccttagcaaaaatcaactctgaacgctggtctatttctaccacagaaatcccaactgtctcatcagtgaaaaggtttgaactcttactactgaacaagaagtaaagccaccttcaggattaaaacaatgaaggtcaccatgtacagatcgcccaaagagctaatatattaagtagtacaataacactgcaatacctttctgattttaactgaatcctttaggtttagaaaagaataatcttaggtcagaataatccagactgatgaatccatgtagatctcaggctaccttagggccctaggataaaagacccacaagcaatccaatctttccaggacttgtatagctggtaatattatgccaacttcacagtgaaaagaactggagctcaaagaacttttaatactatgcccaaggccacaattatctaggagagtagaaatttgagttcaggctggcataactccaaggctaccaactagactggctgtcctagatacaaccacttagtcttattctaagtaatactacattgacccttttggcaattacaagccaatgggtcaactgtttcataaaatttttccttgtcaaatattatagatccaagttatgaatataaaaagaggtgatagttttcctgtttgatatacctacattaaattgttcagataaagaagaaagcaggatagaagaaaatagggcttttggatgtcactaagagagagattatccagtactggtcacgagcccacttctttctgcttatcttagcagcagtatttggaaacagaggttctcaggcttgtttctgactagcccttgggagttctctgggaatatcactaacatgccagggttcactggcaatattgctcattgtaacaaatgccatgcttataccaaaagagggccctttataatatttcagttgattaaaacattctcaaaaccctccccagatgtaactgatttgatctggctatatgaatgcaaatttttaaaaacagtataattttgttttctgacatttgtaattgattttacttatatgccttgttcataataaaacctcaataaatgctaagtaaatagatggatgacttaaaaagttaaaagaaatgatattggaaagacactattggatgttggaagtgataatgagattgggatacgctccaaggtcctcagatggtagccaacaaaatcagtactgatcaatgagatcaatacttcccaactttggggatggaggtgagggaaaagtgggagaagccttaatctttgctcaatccttcaggaaaaataaggaggtatgcggtaggagccttgtaccctctgccccaaaggtaacacataccttataatggaatttgcaataaactgcctccccatttgcattaaccagcttgaaagtatgtgatccatatccattcatgtggcgatgtccatctggaatcccccgatcactgaacaagaaagaaacctaaagaacagaaatataaagcctaaaatgttttcatttaaatcaaaacatccttgatttttaagatattccttagtttccagaaagtcccttaatgacataaaacatactagccaatttcccatgggaagggttaccattattatttcacttgtagaaaataacaaacagaaaaattttaaatcaaaatgatatgcaaatcactaatactatgactcaaaattctatgaaggaaagccaaaacaacctgaaaactggcctaatttgttattcaaaatttatttgcatagcaaatttgtttggtactactttccccccacttccttaatacagagctttaccttacactacagactttcatccttactactgctaaatatcaactgacaatgttgctagctatctatcatcatcatcatcatcatttaaggccgatgaatgggggatgattagtaaagccagttactacaaaactcttcacgatcaagaaatctgaggaagctgattccaataaaatagccaaaactggagagacactttatgaagaggcataattaaacactgcatcccaggtgatataatacaatggcaaaaaagggttcatacctgatgcagagactcaggacgtaggctccagaagtcccagaccatgtccggatccttcagatgtgtctgaggatttctcttttggctgtggataaaagatggaaactaaatagaaaaaagagagaaaaaaatccaaaaactaagtttacaggaattatggtgtctttcattatatatgcctattactaggtttatggattataattctaaatacaatcctagaattttaaactgccaaaccataatatgaaatttactcagcatagacaactagcatctaagataccctaaagtatttcaaatatactcaaaactatagtcttttctttttttttttttttaagacagggtctcactctgtcacccaggctgattgcaatggcatgatcacagctcactgcagctttgacctcctgggctcaagcaaatctcccacctcagcctcccaagtagctgggactataggcatgagccaccacacttggctaatttttgtatttttttgcagagatatggttttgccatgttgcccaggctggtctcgaactcatggactccagtgatctgcctgccttggcctcccaaagtgctgggatttatagtatttcttcacggaaaaaatatacccaccctcccgcatgcgcgcacgcacacacaccccctcctgctgactcagagcatgtagagacaccctctgcttgtttccaaagtaaagtccctctttttactaatcttcgatgctctgcaaggaaaactaaactcacttcccattaagtcaatctgtcttaaaatgacaaatctaagaccaatggtaactgttcttactttatcttattaaatacagaaaaatgtgttgaaaaaagtagtccagacaactcgcattcttttctttctgcctttcccacggcttctcctcaaatgccaacctatttgaaatcaatttaagtcaacaaacatttgttgagtgcaaaatactctattacctaccaatatgggatccctgatgaagaaaatgggggtgttatttccaacgagatcccagttaccatcttctgtgtaaaatttcactgcaaacccacgagggtcccgaactgtgtcagctgaacccgattctccagctacaatattcaaatggaaacaggaagcataagccacagcactttgcatccaagaagcctggagacataaagaagcacctggatccatcctttctaatccacttccaagaactaaattaggtatttaagtgcccgggttattatttctacccaccagctaattcagtccacaaatcaaacaaaataattaattgagagcaataagagaacacatgtaataacagctgacaatgtcattcatttaccataataagataactttgttcaaacaggtaattgaacttttaattaaaataagggaagaaaataattatgaggcttaaagtagtgacaaacagaataagtgagttgtcaaaatgatgaggttaacattaagaaaatgagttaaaatattggttcttagttcttaatttcatttatttttacattccacagtatttttaaaatgcagagactgacacagaaacggaactagtgaagcactaggtatgttgaaatatagtatgatagatctaatactatctctgtaacgtgagaaacatcacttagcctctcaaaaataaaaagaatcccactctgcaaagtagatctacaaatcagagattatatctgtaaagcacctaaccacagttggcacagaattaattctcaataaaggtcagctgtaggcatagttattaaataagatttccactctattcttctgttagaggcaaccacttttaggaaagctctttccaaatgtcacagaattgcagaggtagcctctgtgtaagtgtgatttcctaagacctcaacaaacagaaatacaagtaacttcctatgtgtctccaaatatgtcttctactgtaaaaccttgacataatttggagaagtgcttgcttcctattttctaataactttttctttaagttataaacatccccaaaaggtgaagttgagttaagccataccaatcacgccaataaaccaacttaccaacagtggagaaccgaactgcgatgggagtcttctttccaatatgctcaaatacctttgccttggagtatttggtaatgtcatgtgtgacctcaaagtagccaaaggcccctaacgagaaagacacagaaatccttaccatgagaccattactcagacattcaggtcctcaacaggcacctgggtgacaagagaaaatgatggttagcaccagccttctgggagcttccagtatgttggaggaaggggaaatgcccaaacacaaaataaagagggtgaaatgcaaagccctattctatcattcagtgctaagtcgaatgccacatagctggagccaagagaaggaggtgagtgaggctagaagtcgtcaaggttggcccaaggacacagggtctcagaggggcctgaagtacaggtaggacctatgagagaaagtgaagaacagagagaagaggagatgaaaacataagagaaagaatcttttcaacacttagcaacgatgatacaaagcaagcaataaactaaacaagtcaagatggaaaaatacacacaaaccactggagaagatggggagaaaccttatccaggaagaagagatgaagaaatgcagaagtcctaactggaagtccaagtcagcaagctaagagaaaaacttcctttctgtggagctctttttccaactgagtttttcactttctttcaaataccacccccatcttttgtgtctgatataacagcgataaagaaagttttacagaaattgttggaaaaaaggaaaggaaaaatcatcacaaacccaccaccctaacataactaccccaaattttgcagctcattccagtaattacccagtaagtacatcatttaaacttagttgcaattgcagtgcatgtgtctatgtctgtatttctgtacagcaggtcctcaaacaacattgttttgttcaacgttgtttcattataacgttgatgagaaaaaaatctattcctagctgaggccaccatctgtgtggagtctgcatgttctccccatgtctagataggttttctcctggtactccagcttccccccacatcccaaagatgtgcgtgttaggtgaactggcatgtctgaatggtcccagtgtgagtccaccctgcaatggacagcatcctgtccagggctggctcttgccttgtaccccaacctgccaggacaggctctggcctcccaccaccttgaactggaataagctagtaaataactatcttattttactaatctttcttaaaggtatgtatggctcacatttatttcaatgtttaatataagaggtattttgagtctctatttagaagtttgatgatgttttatcaatcagaaatatgccataggaacttaactcttgcttacgtcaattagcctatcataaaattggtttcattacatgtcgtttaaagtcaaagtttccaagaacctattgatgttaagtgaggacttattgtatttttattccttcaatgatgggagaaatggaagactgctatttttaaaagaaactattttatatataatgtttaacctgaggaaataaccatcatttatttactaatttccctactgctggatgtttttcctttctcccacaaatggagatttgacacttgtgttaaaggtcttccaatcctttgggaaataacacttgacccaggtgctgtgaaacaatctttttacagcaaataaacacagcacttacctgctcctttagcatgcacaactctctcaggaattctctctcggtcaaaatgagccatttcatcagtgaaaaccacatcctgaacaagaaggggcccacggggccctactgtaataacattaagtttgtctcctactgggttaccagctccagtggtcaggacatcagctttctacaggaacacagaaagaaagtgcaggagagttagcacaatcaaacctttcatttacactgtcacgggtacatagctttgcaatgtttataccatctgccctcttttttaatttcctgtgtccaaagtactaaaatctgacaggatgggccattgcctgaaacttttagtgatgccccagaaacccttgacaaatctcaacactaatctgctaagaaacttgctctgaagagcagaaagatgattttggagcctgaaaatgtgctcagcacctgctccagagaaagccactgggttctgcaaagctcccagtcagagaggtgcccaaaagcgtcctacaagcttaacagtgaaatgtccaatccagcaatgagaagacggtctccagggaagctgtgctggtcaatactttactcagaacttacaaacgctttattactgccacgatcttcaagtgcgctaccttgtttagtgcatctcaagaaatgtacaccagctatttgcaacatctcttttcaattaaaaaaaaaaagtcaatggctttcactgtcactaaaagtaaactgttactggtaaggtggattatagtattaatgttttaaagatagcaaatgtctctgaaatgggataggttattttactgtaataaataattaattttaatccacctgattctccaatttcagttacatcagaagacactcagctgtccctcctctagggttagagcggcattcttctagccccacatgatcctggaagctcatagcttcatctagttccatggtcagagaatacttttgaccacagacaactgcctctgcagtgtcttccccgggtcactggaaatcaggagagacacgtaagtgacgcaaagctacgccacctccacctgggagaggaactcaacgctgtctatgacaaaactcaacagaccaacttcacacacagagaaaagcactatttttagtatttccacacacctagagtggagtctgtagttttactccccatgcatgtctgtcctgtacattaaaataaattcctgcctcttctctagaaggcaatacggtggggagtaggcacttacaaaaccacaaaagatctgtgagctgtttgaaaaaagatattgaataaaggagaccgtgcaatttgcaaaactaataaacaagaccctctcacacactagtaaatgcccttgccactagagttatatcttcatccaagtaggaagaggccaacatggcagcagggagaaactatgagtgccagcactagagcctgggtccaacttccagttctaccaattaccagctatgtagctgctggtaagttacttatttatgagtctccattttcatctgcaaaatagaataataagtacctcctaaggttaacacatgaattaaaagagttaaatgtaaaatgcaagccacacattcaacacatatatgctgtcacttcactggctgtgagaacatgacctcgcagcagaaggagcaaagcatttgaagttttatttttctagtaatcatgacagatgcatactcctccatccacactctctcactctaccatctctgtccctaaacccatctagcaaagccccttctaaactgtcacagtttaagggtccaatcaacacttaccacccagtcacatcactcttttgaagatacatatgttgctaatacgtgtgaccctctgtgacgtgctaatacgtgttaccctctgtaggtttatttttaatttaaagtagaaaatgaaccagaaaaaaaatttctactttctaaagtagaaaatgaaccagaaaaagagcaatttcacctttagtttaaacctaaagccttggttttcaaccttggcaatgcactaaaatcacctgaggagctttttaaagcctcctgatgcctgggccatcccccctagagatgtctgatagaagtgccctgggtgaggcctgggctatttttaaatgactcctgttcaagctaggattgaaaaccactaacctagaactattgggtgataacaaagttaaaataattagagagccagagcaaaccaaatctgttcactctttaaatgctcttttcaacttacaaacaaggtatttaaggaagcctttaaaaaataaagggacatccaggctgggcgcggtggctcacacctgtaatcccaacacttcgggaggctgcagcaggtggatcacctgagatcaggagttcgagaccagcctgaccaacatggagaaaccctgtctctactaaaaatacaaaattagtaccaggtgcagtggaggggtgactgtagtcccagctactcgggaggctgaggcaggagaatcgcttgaacccagcaggcggaggttgcggtgagctgagatcgtgccattgcactccagcctgggcaacagcagcgaaactccgtctcaaaaaaaaaaagggggggacatcccataaaaggtacaagtatgagaaaagataccaagaagctcagtaaaaggaacgctaaacagatgagagtgttatttacatgccagcattcttaacgtggggagggagctgcccctaaggcagagatgagagcacatcacatgttcccttctggttaccgggtcagggtgatatggtcaagaataaataccacacccaaaggcagcaggtgcagagttggataaatgaataaagtactaaagcttgaggtggtctttcctgatgacactgactattaagagtgggaatgctggaattatggcagtcctccctcctgcccaatgaaggaatcccctccttaacatcaatcctgttaagaaatgaaacctgagtttttaagttacaaatggaggcttcagaatctcttccatttccccactctaacagttagatcaattgtcctcatttatataacagctttccccacaagctcatgtatatacaatttaccttcaaagccagtggggcaggaaagcttcaacagtcagcaacagaaaagggaagccagggagcaaaaactagaaaggaaaagatcccccaacttcaggggatgtttagcgcaacattggataagaggaactgatctaaactgaaagatagagtattaatattagaaggtgaggagcaggatgcggtgtatttaagatgaaaataattaatgcaatgaagatttactagatgaaatgagagggtggggctagaaaacggaccacgcaagttatctcacttaagcctgtcaataatccagagatcaatattattaatcccatttaatgggcgatactacaaactcagaaaacttaagtaactttgcagagatgtcagtgttgtggcacaggtttacttgttacatgtaacacgtaaggacaggcaaagagatttcctccaacttgcaattattgtttttaactcaatgaataactttagagccagaatatttttaaagagagaaaagcttctctatggctggataattttaagacctctctctggagaggtccttgttaacatgtttacatcttcctggctgctagctcccatgacatccatacgtacctctcctgaactgctctctctaccctgccccacaccactcatgaagcagggccaagggcatcttcttgtgccccatataacaaaatattgtaattgcctgtttatgtcactgtttttctttttttttttttttttttttttttttgagatggagtctcgctctattgcccaggctggagtgcagtggcatggtctcagctcactgtaacctccacctcctcccgggttcaagcaattctcccgtctcagcctcccaagtagttgggattacaggcgaccaccaccacacccagctaatttttgtatttttagtaaagacagggttccatcatgttggccaggctgatgatctcaaactcctgacctcaagaaatccgcccatcttggcctcccaaagtgctgggattataggcgtgagccaccgcgcccagcctgtcactatttttcctctctagactgtgtactccttttacatctatatacctgatccctaatacactgctcaatatactaacaaacataaaacaaatgtgtgtggattcagcatgcaaataaactaaaccacggaccaatatgatatggccaagagcctttctaacaagcaggaggaagcagcaacagtctatccctctccctgcatcgcccctccaaaaaatgagagaaatattttaatttataaattctgatcaaacacctttagacacacttgttatgaaaactgccacagaaattagcttggctaaaaactagcacaattattagaagtagggacttaaagtaaaattctattttgactttgctgcctttataggcttcttttggccagagctaatacataaatgaagaagttttcctgggaggagtaaggttggcttcatctggtgaaatattttatcaacatattacactttccacttagtagttcccttcactcacagaagtttcaagaacctaaacatattcttccacttttaattaaaagattggttaatgcaaattgcccatcagtcccagaggagtcataatgacgtcttttcattctgtgataaagaatgtgcctagcgttttctagcaaataactgcctaacattctccatttattcaacaaagattcaagtgcctacaacgtatacacccacgtacaggaaaccaaagactgtcctgaccttcaaatttcttggtctgtgggaaaataataagggtggtctagatattgactgctgtggaagctaaagcaattccgtcttagatactgatccaccatgctgacttctgattaactccagttttaagatttccagtttatctattattccttgtgaaagagcccctatttactataaatcctgccctgaggtcaaacaaccttgacattatcatacttcagtcatgccatacctcccttctgaatcgcccttccctatggtattaagccctgggtctgaggggtaatggtatgggatccaccatcttgtctcgccaacacgcaagacacagacatggtttctggtcctaagtccctactaaacatttctttctgagaaacttgatttgtcagcctctttctttggcctctcagcttcctcagactttgggggtaggtttgcatagacctacccaccatgcaaaagctaaaaaaaagaaatgaaaccttaaaaatttctgtcccatctcccatagtctctcccactgcacataatgacttagcgattccatacctaggtatatttcaggagaaatgaaagcacatgtggaccaagggttaagtcactcagtcaccccttctccatcccaaatgttagcagtgtaacatcaatgcagttattaccaggattaccctaaaaaaatatagaccctcacaggctataatgcataggcaactcactgacagaaatggatagtctaagacttaacctctctcccaggtaataagagaactgtataaaaaggtaaggtttgaaatgttcaaattctcccattttaaagggatcagaggctacttattaacatttcccatttacccccaagaaaagagcactggcagcaagctgcacttaaaaaaaaaaaaaggaaatgggttaaaggtaagtatctcaaaagaagagcccatggcattctaagcagtgagcaataaagttcccatttaagttcccttcaaagtggctgggaatacctgcacaaccacctccctcctgccaagagagaaaaagaaataagaatttttaagtggatcgaggtcatactcatgaacacatctgactcaatgctcacttattaaagtttacaaaactcccaattcacctgtcagcaaaccaaatctgaccacagaagatacgcccaataaattgctttcacatggttgactgtgtttccaaaataggacactctgattcttgagagaggaggcaacagagtgttcgcctatagtagtcccaaaccataaagctctcctagatcagtaaagcatcacaactaattgggaagtggaagacatcatattagcacaaagctgcccacttagataaaagcatttaccaagcaaggggagatttttttttaataccatctgttactgtcataattttctaacagaatatcttaatgtcagaaagtaaaaatgacatattctttaaaaagaaattatgttgcatgtccattgccgcatcacaagaaaatggctggacagattttcaccaaatatgaaatgtacgctttggataatatagtagagtcagcttcctggacagggggtagactaccccaggtgtggcctgtaacagagttctagccaacagaatgtaagtggcagtgaccctggaccctaaaccttcccacactcatatacccttctccacgctcttgagccttctgtgctggacagtgacgcccataaaagccatgtttgaccaagggggagcttccttcagcctggtgccctcaataactgtgggaagcagagcacccacccacctccttcaacctcaaaccactttgggccattcatgtaggaaaggaatacatttctttttttttctttttgagatggagtttcactcttgttgcccaggctggagtgcaatggcaggatctcggcttactgcaacctccgcctccagggttcaagtgattatcctgcctcagcctcccaagcagctgggattacaggcatgtgccaccacgcccagctaattttgtatttttagtagagacagggtttctccatattggtcaggctagttttgaactcctgacctcaggtgatccgcccacctcagcctcccaaagtgctggattataggtgtgagtcactgcacccggccataaatttctaatatgtttataccatgatacatgttgagatttattattataacacttagcctacacatgattccacatgattgaacttaaaatatgggctatgaattaataatttaaaagcaattcaatttttaaaaagacagaaaatttgaacatatacttcaaaggaatatataccaatggtcaataagcatgtaaaaagatgctttgcatcattagtcatcagagcaaagcaaattaaaaccataatgagataccactgcacacccaacaactaaatgtaaaagactgacaacaccaaaagttggtaggatgtggagcaactggaactcccatacactgctgatgaagtataaaatggtacaaccactttggaaaaaggctcagcagtttctcataacacattcacttaccttatgacccaataaatctactcctaggtatttcctaagagaaataaaaccacctgtgcacaaaaagacttatgtaagaatttttatagcagctttatttatttttaatttttaagacagggtctccctctgtcacccaggctagagtgcagtcatgtaatcatggctcactgcagcctccacaccccaagctcaagcaatcctcccaactcaacttcccgagtagctgggactacaggcatgtgtcaccatgtctggctacttcttttatttgttgtagagatgggttttcaccatgttgcttaggctggtctcaactcctgagctcaaactatcctcccacctcagcctccaaaagtggtagggttataggcataagccttcatgcccagccacagcagctttacttacaatagaaaaaaaattaaatagcccaggtgtccagcaacaggatatccaaatggtggtatattcaaataatggaatcttactcagcaatgaaaagaacaaactgctaatacatgaaacaacttgaatgaattaaaggatggacagacagatggagtaacgtaataaaagacacagggcaaaatgttccttgtagaatctagatggcagatatatagatatacactgcaaaattttttcaacttttctgaatatttgaaatttttcatttaaaaaaagtgtttgaaaattatataggctataaggcatatgcataattccttttggagggccctgggtggagggagaagtgcctaaaagaagtaagcggtttttactaagagcagctaaaactgaggaacagtaagacatcaatgtgactgccaatcaggacgatgtacacagtgccctgagatgtcatggacaaaggggatggctgtatttcaattaagagcctcccaactatagatgtgttttggagtcagccatttctcacatgggcaactatgtaaggtaaatcaacagcagggacttcaacagttcatgattctcccaaacaaggaagaaggcagctagtctcagaataaaggggagtcctttaaaaatgaaaatattacacctgtaatctcggtactttgggaggccaaggcgggcagatctcctgaggtcaggagttccagtccagcctggccaacatggtgaaaccccatctctactaaaaatacaaaaattagctgggtgtggtggtggacacctgtaatcccagctactcgggaggctgaggcaggagaattgcttgaatccgggaggcggagtttgcagtgagtggagatcataccactgcactccagcctgggcaacagagcaagactccgtctcaaaaaaaaaaaaagaaaagaaaagaaaaagaaaaagaaaatattttgttttgtaaaaatctcactactttgtccacacttttctcaattcaccgagtattcatgaaaacttcagtgtgaaccaggatttgcacccactgggtaaggaaagagtcttgggtccaagaagctgaattctaaccttgtctctgccagtaagtagtggcacatcctttactaagactctacctctctctggtttactttaagagctcatgaaccaacctaatggtatataacaaagaacagggccaagaggggagattttccaggcccttggaggagaatggcagccttttcccaaacagggaaccattaaagcaatccatgagcacttagcattaataccccagttcacgaacctgagttttgagcaagagcactaggcagaatagggaaaacagggctgcagtcctctgtctaccattaaccagcagccagggaacagggcaagacctttagactccctgggccaatctgccaacagtagactcagaccagatgtggtctcatctaatccaacctcctcatagatgccctctgagactctgcagccgtgggcacaggccaggaatgcctcccccaccaccaagttaaaatcctactcatttaaaaaaattcctgttcaaatgtcacctgctttgtccggcccacctggtcactccctctacattctacagataacctctattagagccctcaccacgctggagtgtaatcatctgtttatgtgtctcgtctcccagactagactctcagcttctcaagggtgttgttcttgccgcactggaatttgtacaccttgccccgaacagtgcctagcacctacaggtgctcaaagaatagaataaacgcattaatcaatccctaatgtcaccccccagctctaaaatgctaggcttgacattttgaagtgcaaatgagacaatgaatgtaaaagttcttttatttagtcgtttaataatgtgcatagtacgtaccagtcactgtgactggtgctggagacctcaagattgtaaaacacaatccctgccctgctgggaccccacaactatgaaagcgtgtaaacagtatttcaagaagggcaccattagagcctggttccacttctcccctcactgacttccttgcagctgcagctctctgcctctttccccatgagccctcaatctgtcctcaagctgcgacctctgtcccagttggcaaaagtgcaaaattctgaagcaaccacccgagcctgtcgcggacaacaaagcctgcagtcccgcgccccactacccggacccccctcccctgcttcggcgaatgtaaaagtccgtctgcaccgaaggggatcccccctgcccagtgagccgcggtacagtccctccaagcgccgccccgggggaagccgggcctttacttgccgacgcccccgctttctaaacggaccttcgggcccgctcggggagcacagagtgtacctgcgcggcccgctgctccttccagtgctgcatctggtcgctggcgggatcccggctgtcagccatagcgtgcggtttgctgtgcagaacactgcaggaggcctcggctcgtgggtctccaccctcagcaggcaaatctgcctgttgccccgagtccgtggcgacttcaggctcagccaatcagcaccaccccctcgtcccgccccctcgggaggactgccttctgattggctgctcggcgctaggcaggccaagattggaagcccaatgggctcggagcagggctctccgaaggaggcctgaagaccggagatacccaggagggtgcggaaaggaagggtcccgctctggcccagcaattggagagcctcgccccgccggcccggggtgcccgggatagccgaacccagggcggggctcccggttatcagcatccttcaggccgccctgggacgcggccgttggtggcctgccagttttgcagacggaatacttagaccctgctgggtggggccttgcgctccatagctatgctttctcagctcttaaaaagtcagcaatcctgggttaaattactctgtacaaaattaaattttgccatacgctaatgtaagtattatttgcaaccaaaggatggatggatgcttttctttttctttcttagctcttcttaacttattcgtggattatcacttactagactagtatactaattatttaatataaaaacactctgaaacgtttatctccgtacagatgggtgttgatttcctcctttaccagagaaaaacaacttaacttagatgggaaaaatgtattcccttgtgatgggaaaaatgtattcaactctggtacactgccaaattggcttctttaaacactggagaaatctgcttccccaaattttacccccaggtaagcaggaattttgaaaagctttgtgtctttaaaaagctatgttgaagagtaaaatacttagtaatatatagtacaatatttagtaagttactgactagtttgtcattgtaatcaaagagtttgaatgatttctacacctcctcaggtgctaggatttatctttaagcaccttaatatatatacatagtatataccatcatcttcaaattaaaagttatcagcttttaattttttccagtacaactacatataatgggtggatatataatagtggaaacttcacatgttgttcttgatcttacaaaagtatgataagaatcttgggcataaaagtggaactttagcagttcattggaaaagaaagccacaaattgatctttagcaccctatacttttcctatattaaaaacaattataaagatgctgttggctgtgtaatttggtgtctttttctacctgcccgatccatactgccaagactgtaaactccatgtgggtcaggatcctcccatccataatttattgagcacttactatataccagggactattctcagctttttgtatatttgcttagttaaccctcccaacaaccctatgagttagatactaatattatcttcattttacagattaggaaacagaggtatagggaggttaaataacttgcccaaagttacacagctattaagggatagtcaggattctagcttcagctgttcatctccaaagtccacagtttgttgaataaataaatgttgaaataatcgagcaaatcatcttcttaactaaccaacacaaatatcaacaaaataaataagagacctggagtcatttcttaacctttattcattatataaaaaaaagcatgtttttttttcctttgtttttgttactatggatttgaattcctaaagaattatttctagagaaagaaatggagaaacaagactggtttctgatcttgtcatatcttgtattttaaaataaagggcaggcttacaagtaatgacaataaatttataatgttacataggaggctgggtgcgggggctcacgcctgtaatcccagcaccttgggaggccgaggcaggcggatcacttgtggccagaagttcgagaccagtctggccaacatggtaaaaccccacctctgctaaaaatacaaaaattagctgggcgtggtggcacacgcctgtagtctcagctactcaggtggctgaggcgagagaatcacttgaacccaagaggcggaggttgcagtgagccaagattgtgccactgcactccagcctgggtgacagagtgaggcttcatctcaaaaaaattaaaaattaaaaaaagtcacatattaggtggaagttctatcgactataattacagcttaaatgaaaacacttcttaaaatcagccctagttaaaaaatacttgaaaccaaaccaatacaattacctaaaggtaattgcaagtgattggttaggtaaacaaattgggttctaggttttaatattttagtcatatgaattcatgggtatttttattgatataaataaaaatgttattttaaaaatgctgttctctgaagtcaattttcagaactcaatgaaaataaaatatactggcacaagacatactgttattaatcctggtatcaacaaatttgaaaccaagcttgcaaagtagaccatgtaacaaatgttcaagaaaaacatttgagtactcagctaggaatctttatagacaaattttatttcatcagtattgcaagaaaagaatggagagaatgaacatcatgtgttgttggatgacaggcatacaagacagcacaaggggtaattactctgttctgattccacccatcctcagagaggccgagaatgttctacatatttcagtttcattctcttcacagtggccttgtgaggtaaattcagagttaggcaaaaaggaagagaaaagaacacaacaagaaacaaagagagttacaattcagtattggctgttggctttaagagaagagaataaacatcaccacagctccatgactcctgttcactgtggaacaggcttgagcaagccaaagaagaaggtgggatttgctttaaaaagtagcagtggtgttatatgcagtagcagcacataccttctgctctgcctatttggctgcaccatatctttcccgctttaatatgaataattgcctacttgggaggaggcaacccagatgtcctctggtgtctggtgatggccatagcatgagctatgctaaggagaagaacatggatgtgccttttcccgcctcggccttacgtgccacgctactgatctggtgtttgcaaaaaaaggaaacataggccaggcctggtggctcatgcctgtaatcccagcactttgggaggccaagacaggtggatctcttgaggtcaggagttcaagaccagcctggtcaacatggcaaaaccctgtctctgctaaaaatacaaaaattagctgggcgtggtggctcttgcctgtagtcccagctgcacgtgaggctgaggcaggagaatcgcttgaacccaggtggcagaggttgcagtgagccggggtcatgccactgcactccagcccgggtgacagagcaagactccgtctcaaaaacaaaacaaaacaaaaaacagaagaaacatagaaataataattgggaatttgtttttaccttcacttttttttcttttttttttgagacgaagtctcgctctgtcacccaggctggagtgcagcggcaagatctcggctcactgcaagctctgcctcttgggttcatgccattctcctgcctcagcctcccgagtagctgggactacaggcgcccgccaccacacccagctaatttttttgtgtttttagtagagacggggtttcaccgtgttagccaggatggtctcgatctcctgacctcgtgatccacccacctcggcctcccaaagtgctgggattacagacgtgagccacctcgcccggcccttaacttattttttatacttactaatggaggcttggaaaatgcaggataaaatatcaaacaatcattcaaagattacgataaacaggtaacatttttaccaatattttctctcttatatgtttgtaaaggagtgtgtgtgtgtgtgtgagagagagttttacaatggatcctatagaatacataatcttatatcctgctttttccacctaacattatcagataaaactttttccaagtcattaaatctttttccaaaatgtgatatttttctcctatgcctacacaatttgcaatcaaaggactattcctttatttacatactcctttactgagaacatttaaattgttttcttctataacagtacagtgacatccttcctctacatttgtatttatttccttaggacctgttttcagaggtcatttttggttcaagtcatttgaactttttaaggttcttgtgacatgttgttgattgttttctgcaatgctcgagctagtttatactgtcacaggcactgagagtgtggattggaagtgcaattttcaagacaggtgaatatctggattctggatgttcatcaattgcatatttcatcacattcttctgagagagaaggcctctcatgttatgttcagccataaccactaacccatgggagtcatccaatatactggatgtctgctgtgtcctgggccccctgcctattgggctctgggagtacaacagcaaaggacgtggacatagacaaataatcagacaataacacggggaaaaagtgctgagagaagggaaggccagctgttattaggattacctaagaaggtcgcctaacctgaacctgctaagtcatggaggctttgagtaaagctgagaaactgaataggtgtcaggcgtggtgtcaggagtaagcattatatgatccaccctgctaccgcagaaatccagattgttaaccacttttccctaaaagtctgacttcattcatggtgatatggagatggcttgagtaggactcagtagcaagcaaatatttacaacaggtgttgagcctttttcaagtttgtgcaggtccactggcctctgaacttgactttgactagcttaagctcctgcggctcacccacattccctccttgcctctgggctcctgcaaggcctgggtcaaccagtcatgtttaactactgggattcacatgcttggattgaagttatttttccagtgctgctctctcagaggtattttgcttgcctcccttgtttatgctttaaatgttgcacctgggcttgaccttgggtttaagtctgtttgcagaaaccagacatgggttcttgtactctgacaataaaaataaaaagtcaaacctcatagacaatcaacacattcattatggactgagagcacacacaattatgcatctgtggagaaatgaatagttatgaagtatacatgtttgggtggaaccattggtcatagctaggaatggtcaactagggggaacggaacaggtagctctcttctccctttctttaccataaacccagatcattacctagtagggctcaagagaaaaaatagcatggtacatggttaacagccccagcgctagcatcagagcacttggggtcaaatcccaccatggccatttacaaactgtgtgaacttgggcaagtcacttaatttttctaagctaccatgttgcttttgtaaaatggagatagtaacaccttctatattaggtatcacccaagcttctataacaaaaagagcctcccaaaaaaccaacaaaatagcatagacaagatcaaagcttatttctctcacaataaagcatttcagacctaaatggtacagggctggttaggcaactctgccatcctcaatacatagcttccatctctgagtccaatgtagctgctcacttgatcataactgcatgccagccagtgggaagggggacaaaggagcaaagggagcccatgtcctttcctttttagggcacaatttggaaatagcacactttatttctactcacattccattggccagaatttcgtcacatggctatgcctagctatacaggaaaccgggaaatgtagtcactggctgggtggccatgggcttgacaaaactcaggcattctattataaaagaaaagggaagtgaatatcggtggctgatcagcagcaccggccacactgacctccaagggtagttggaggtttagggaagattatatgaaccatatgagttagttatctgtattatctgattattagtatttctatttattctggagtgccatgtagctcttgtatgagttgcaacgctgttcagaaaatacagcaaactttgttgtaggatatactattatactcatccttgcgggatgtgctgtagttcagagactgcctctggacactgaagtttggctccaaggtcacattatgatgaacaaaggccaaccactgccctaaaccaaaccttcctatcccacaaaaccatcctttcaaaacatattttgtttaattgacaaacacttaatattgctcttactatgtctaggctctacactgagggattttccaatattaacccatctaatccttataacaatcctataagagggaatggactcttactaccttcactttacatctgagggcactaaggtacagaaaggttaagtaacctcccgaagttacccagatagtttgcaatggggccaggattcgaacgagacagtgtggctctggagatcacatctccactcctacgttgttctgcctgtgacaaagtgggcaggaataaaggaagatcttgagtgagtgttctacattcttagaatttaactccagcattgcactaccctctgcccacctgaagacgcggtgttacgggaagcaccctgagtaaagcaattgtgaaatccatgttttgtacccacatagttgagaagaaccacaagaaaatgacattcttctcagtctttaaaagacaaaaaatgggaagttgttatggatttgtaatataagagcatgacaggcctagagagccacatgggattgaggaacagccaaaggcaggaatgagagtgctggagaagaggcagcttgcagagcagcaaggatgaaggaggaggaggaagatctctagctgcctctccttcctgacagcaaagggcaggcagagacttagctaaacaagttcattcaaagaatcattttccaccaagcaagaggacctgttgccctgtatcatcttatatgcagctcctgttccaggatacgtggacataaacagattcagttctgagacactgtgacatgaagcaaaattctccttcttgtgtcagatgtggaaagcaattgctccaggcaacctgaaaatgaagatctatttacttctttttttttaactgagaaaataaagagaaacgttattttatttccttgtttgtcctctatataaattctgaaacaaataaatcatgtctagtgcctacctgcctcatcagtgggaactgaacttgcattgattccagaaagaccaaacaaaggacagtctcaatctgcagtgacatgatcccatttgtgacatttaatgcagttcatatttctaacctgaatatcaaagggctaattttttttgtttatgtgatctttggcatatttttctcatggagcttctttctgccatttaaatttgtcttcattctctcctgttttcttttttctctgtttccttttttagctcctggtggggcctcacaaatgaaattaaggccattctttacacattcatctcccataagcaatctattttcatatgattattgttctttaagatactgctgccttcattcttcttgtttcttcttatcatatattttctgttctgccattcatactttttttttttttgagataaaagtctcactctctcgcccaagctggagtgcagtggcgccatctccgctcactgcaacctccgttctcgggttcaagtgattctcctgtctagcctcctcagtagctgggaccacagacacacggctaatttttgtatttttataagagaggaggtttcgtcatgttggccaggctggtctcgaactcctggcctcaagtgatccgccggcctcagcctcccaaactgctgggattacaggcatgagccaccacacccggcccattcatacttttttgatactggatttggaggcaagatgaacatccttcttgcacatgacattgtcagaggatttccccatccttgagccagagctggggaaagcagtggctagctctgtaagcaacataaacgaactacttagcaagcactagcttaattctctgaaactttgtactgggatttttcccaatcccatcccacccaatattctaaatgtcaatgaataacaatcaccgttgcctttctcttgtctggctggcccctgaggtgtgaaacaacttactcgatgggcaaattatagatgatacaatattaggatttgtatcatctttctcttaatgcccttttaaactctgcatcctcaaaagaagccagaagccacgtggctcagcttgggggcctgtagtttaccatgttgtcttctcaggaagacctttcttgaccacttcttttaatcttatagcttcctctggcacttcctgtcatgccttccctgctttgtgttttctctgtgatccttctcccttttaacatactatataaccgatttcatttgtttattgggtatttctcctactagaatagaagtccatgaggattggtgggttttgtttctggttttgaattttctgcttattcttagcacctgcaacagttttctggcacccaggatatttgactaaatgaatgaacaagcaagtgaattaatagatgaggtaataccgggataaaccatgttacaaataaccagagtaagtgacaatttgccttgagggatttgagggagaatttgatcagatgcctggctcaaatacagataccctcccatttcatttttaaatatattttcctttaggacttgagtactttcccatattctcaaaaagagtcctcttttaaaaaatagatatattgccgggtgcagtggctcatgcctgtaatcccagcactttgggaggctgaggtgggcagatcacctgaggtcaggagttcgagaccagcctgatcaacatggagaaacctcatctctactaaaagtacgaaattagccaggcatggtgacatgcacctgtaatccctgctactcgggaggctgaggcaggagaatctcttgaaccagggaggtggaggtttcagtgagccaagatcatgccattgcactccagcctgggcaacaagagtgaaactctgtctcaaaaaaaaaaaaatagatatattacccccattatgaaccttctgacatggtacaccaggaaggactcaacatcgcttctgtggcattcctatcaaaaatgcatactctgaatctaatcatgaggaaacatgagacaaactccaactgaggaacagtctacaactggccttttcaaaatatcaagatcatggaagttaaggactaaagaactgttccagtttaaaaaagactaaggagacatgccaactaagtatgaagagtgttcctggactgggtcttggaacagacggaaaagacttcagaaacattatggagacaatttatgaaatttaatatgggccataaacttaatatgaataagaatattgtatcaatgttaaatttccttgttttgatcattagactgcagttatgtaatctcttacatcagagatttcttttgtgtcttagaaaatacacattgaagtatttagtggtaaagaggcatgatgtctgcaacttactctcaaatgggccagaaaaaaatatacatcatatatatccatatacacatgtaagtaaagagagcaagcacttgacaaaataaatagagcaaaatctgggtaaagggtaaactggagttacttatactatttttgtaactttctgcaacttagtattatatcaaagtaaaaatttacaaataagtatacgtatattcctagggtgagtcatacatgagcatctcaggtaataccttcattacaagttattcagtagctgagagcaagaactggacactctcacttttgttacttcttcaccccaacctgaggacccccacatgaagatgaggaagaagtggaagacattaaattcaaacttcacctacatcaccgttttgccttggacccagtgacttttacagaaacaaattgagacacagagaagttacatagattaaaagatagaaatacgggttagggccaggcaaggtggctcacacctgtaatcctagcactttgggaggccgaggcaggtggattgcctgagctcaggagttcgagaccagcctgggcaacatggcaaaatcctgcctctactgaaaatacaaaatattagccaggcatggtgttgcatgcctgtaatcccagctactcaggaggctgaggcaggagaatctcttgaacctgggaggcggaggttgcagtgagccaagatcatgccactgcactccagcttgggtaacagagcaagactcctgtcttaaaaagaaagaaagaaatacagcttggggtggcaactcacacctgtaagtccagacctctggaaggttggagcaggaggatctcttgagtccaggagttcgagaccagcctgggcaacatagtgagaccttatctttacaaaaaaaattaaaaattagctgggcatggtggttcacacctatagtgccagctactcaggaggttgaggtgggaggatcagttgagcccaggaggtagaggttgatcagtccactgatgatagctcactgcactccaacctgggcaagacagcaagaccctgtctcaataaataaataagtaagttaaaaagtaggaatatataaacagttaaccagacaggctacacagagaaatgaccaaactattttcttaacccttatacattatgagatttaatgtgttaatacttataaaaccctgaagtcatctgacaaaatgtaccctaagcttgccttttattatcctgagataaggaattacttgacaatgaacatcgtttctgacttttttatgacagtataattggttgacattagtttaataaatatcagtcacaattttcaaaataggccctgattttatggctgcctttggtgatgtttggaacatgccatctcttgcgctattaagtttacagattattctgtgtattgttctgttagcaagaaccctagcaacacaagtcttgatgtctgaagttaactaagtgcaagaaagcaccttatcttataacaacttgcattcctcaaacatctgagcttctgttgagtgtcctcagtaatcatcaaccctaaagtaacccttgagcaagggaaagtagggtgttggaaaggagctggggcagctgaagcccacgacaaaaaaaaaaaaaaaaaaaaaaaaaaaaaaaagatgccaaaagtgccagtcatcaaaactcttgagtgctgtaatgaacgctccagggagcattgtagttgggagaatgattcagcagtggctgactctaggctacatggacagattcaacgaagtttatggtcaaaagcattgcactggctggaggcagaggaggtgtgtggtttgtaacagaaaaaggcatttgtcctccttacatcatattaccctgtgttattactctctgcccctctcaaatatatcaacacgaaagctctgtgacctaaagatgaaaagaaatcatttgcaaaggtcaaacatttttgtgttatgaaacacaaaagtctatgaaatccaccacatacattgtgaaaccaaagtcaaggttctatttattctgtgccagttcagtgtaggaagaaaaagaagtgatgaggcatatttttaaagacaaaaaacttaaaaaaaatggacaaaattatgactgcagacatgtggagagtcctatctacaccctgtcagatggtccaaacactccactcccaaccatttagccaaactttgcatctgtttatggctacatctaggaaatcaaaagcagatgacaacatcatcactgcagccaatgtttgtagcaaatattccttctctccaaaggcttagaaatttgtgaacgtggagccaggaagacggaatcataattaaatgcagatgtgctatcatgttatgctattatgcacctaaaagaaacaatgacctggagtgcaaaaccagtgtctccctgagagagccccagatggcacagtcgggctaaggacagatttcactgtggggacctggctgtgaaggaaggcctagaaggaaactaaagagataaacattgagattagagagtctaccttcgtcaatttaaaaaaagaagaaacaaagatattagagaaaactcatattgatcaagactagatctcagttctgaaattcggaggaaagtactgtttgtccagaataaaaggagggaatttgcaaaatccaaagaatagtggataaggcatggattaaaatagcttcaggccaggcacagtggctcactcctgtaatcccaacactttgggaggcagaagctagaggatcgcttgagcccaggagtttgagaccagcctgggcaacatagtgagaccctgtctctaaaaaaaaaaattaaaaattagctgagcatcattgcacacgcctgtagtcccagttactccagaggctaaggtgggaggattgcttgagcctaggaggttgaggctgccgtgagctgtgattgtgccactacactccagcctgggtgacagagtgagaccctgtctcaaaaacaacaaataaacaaaaaatagcagcttcagtagaagcacatttatccagaggtggagggaaggaggcctggctacaagaaaccttcatgctcaactggcaaattcagctctgattgtaaagcataaaaggaagtatttttagagcaatacttactcaggaaacagtaaaactgaacattgtgtttcatcataactggctctaacttgctgtggctgattaggaccataaattttgagtgattcaggtatgccagaccctcaaagaatctaactgaaaactgtttattgaccaatgaaccacaggacttgttttaaccaacatacaggcctgtggactctttcctctctatccacagtgctagttttcaatccttaatttgtggccgttaacaaccgctgatttgtaccccctcagtgaaactactcaatcgacttttttctataaaatatattccattgtctggcaagttttaaaaaaacacttgattttttttaagcactgaggacctttatatatatttttttttcaatattttatatatattttcaatagctttaggggtacaagtggtttttggtttcatggataaattgtatagtggtgaagtctgaattttcagtgcacccatcacccaagtagtgttctttgtacccaataagcagtttgccatccctcatttcacttccaccctcccccttctgagtctcaaatgttcgttataccactctgtatgtccttgcatacacatagcttagctcccacttacaagtgagaaaacatgtggtatttggttttccactcttgagttacttcacttagaataatggcctccagtttcatccaatttcctgcagaagaccttcttttgttcttttttatgactgagtagcattccatggtgtatgtagaccatattttctttatccattcatcagttgacgagcatttaggttgattccgtatctttgcaattgtgaattgtgctgcagtaaacatatacatgcatgtatctttttgatttaatgactttttttttcctttgagtaaatagccagttgtgggattgccagattgaatagtagatctacttttagtttttcaagaaacttccatactcttttctgtagaggttgtattaatttacattcccaccagtagcatataagaattcctttttcaccacatccttaccaacatctgttgttttttgactttttaataatagccattttggctggggtaggtgatatctcattgtggttttaatttgcattccccgatgattagtaatgttgcactttttaaaaatatgtttgttgaccatttgtatatcttcttttgagaaatgtctattcatgttctttgcccactttttgatgggattatttgcttttttcttgctgatttgtttgaattccttgtcgattctggatataaatcctttgttggatgcatggtttgcaactattctctcccattctgtggattgtatgtttactctgattattattattattattgctgtacagaagctttttcgtttttgttgcatttgcttttggggtcagtcataaattttttatgttaaccaatgtccagaggagttttttcaaggttttcttctagaatttttatggtttcaggtcttaaagatcttaatcaaatatcttttttaaaaaagaggaacgtgaacaagaaagataaaggatgatgtgtgtaaaaagctaaaggtgactgtagcccctaaaagctgtataaagaagggtagggtttggaaagtgccagctaatgcttccccatcccaggtgtgaggcaaggacaatggaagggatgtgagtacacagggatcattaagagacatgtggcctctttggatgtaattcctggagtcccagccaccactactggcccctacctccatcccaatgctttggatttcctggttacaacagcagtgggaaaactgaaaatccattcttttttttttttttttttttttttgagatggtgtcttactctgtcacccaagctgaagttcagtgacaccatcttggctcactgcaacctccacctccggattcaagtgattctcatgcctcagcgtcccatgtagctgggattacaggcacccacccccatgcccagctaatttttgtatttttagtggagacagggcttcaccatgttagccaggctggtctcaaactcctgacttcaggtgatccacccaccttggcctcccaaagtgctaggattacaggcatgtctggcctgaaaagccattcttgcaagagctgttggttcgactcttcacttggagtccaggtttctactgccaggggcaccaccacatcctggcatctctcctaataccacaccatcgtcaccatggcaactgttgcctcctctcgtttagttgccatcacctccacaagctttcaccgccccagtgaggtacctctcccaatcatgttgatgtgcccacagtacagggagaccaaccatcctggtttacctgggacagaggggtttcctgggatgtgggactttcagtgttaaaatgggaaaagtccctggcaaatcaggatagttggtcaccttaccaccatagttgccacaactgccaccgccactgactgtgtctttgaagtcgaggtgggaacagtggagcatacttctgtcctatgaaacagtgctagggcagcttttacttccaccttgagtgccctgccaagccctcaggggaaattcacacatctccatttccttgaatggaatcacgcaaccctaggaggctgcactgccttccctcaggccatttctcggtgacagctgtgtccaccccactgtcaccccagcgatgttggctccaggctgaatctgcccatctttcccgctccgttatctctgaggaggaccttcaccacacaacctgaggaaggcaaactggacttaaaacttactgcaattgtctatacgtgtgcaccaatacaatccatagaatactcatgatttttaactgtaaaatctgctcaagtgttatgctaaaagggtggagaaataatactttcagatagtttttttcaaaagaaagaatgaaatatttaaaagagaaatttgttaatctcaccaaaagcctctttttaaaaaaattgaaatgatactaatatgctgttttttataaagccatatatattcccttcaagtgctttagaaaatagagaaaatcatataaatttaacctcccaaaatcacccccaaattttaccatcccaagataaccattgttaatattttttcacaatttgatgaatactcttctagttttatctatgaatgtttatgcacttaaatatagaaggctttaaataaaatgagatcatatatattatttacaaatattacatatatacatactatataacttgtgcttctcacttaatatgtcataaacatctttccatgttgacaaataaaaatctccatgatcgtttttaatggctacatgatatcccatgtattccacagtattccatggatgtttattctaggccttcttagctgcggtagatagcagcagaaattctccaaagagaagcttttaagaaagcatttttcttaacggctgcctccacttcattgcagtgttgacatctcttaaaagcctgccaaaactccaattcccacagttgtttacagagtagcccataaaataagatatctgaaatggcatctttatcaaacatcaccaaaaagaggaaatagaaaacccagaggcactctggtctaatagccgtgattcttgtaagtagactattccagaaaacaaaaacaaagaggggaaagtaactgaacttccaaacactggcagtgcaatccaaagaggtgaaaagcaaattcacatgagctgaataaagaaactagcaatcaggaaggaagcacaggggaaatcacaaaagaaagcagaagagcagcccttgagataagaaaaaggaggcaaacatgagaagggttcttcagaacttggagatcactgtagataacagcagaagcacggcccggcaccgtggctaatgcctgtaatcccagcacattgggaggccaaggtgggcagattacctgaagtcaagagttcgagacccacatggccaacatggtgaaaacccatctctactaaaaatacaaaaattagcggggcatggtggcacgtgcctgtaatcccagctactcggaaggctgaggcaggagaatcacttgaacttgggaggcagaggttgcagtgagccgagatcacgtcactgcactccagcctgagtgacagagtgagacttcatctcgaaaaaaaaaaaaaaacaccaagcagatgcatgaagaaagagaaacaaaggtataggaaacaaatgcaggagtgcagactaatacttaaatgtcttttttggtcagggcttttagttgtgaaatattttatacttaaaaatttgaatatgatataatttatatatatgcaatacatacacatattatagagaataataaaatcaaacatctgtgattcaccactcagcctaaatagaatcttaccaatatgggtaaaacctttcgcatatccttccctgatattccccttcctctcccttgctttcttttatggtttaatcaaacatatgtgttctatacataatatacagaggggagagttagcctgtttttaaactttatataaatgctatgtgttcttttgtaaacagaaaacctgcctgaacagagtccatctttaagatttagaatgtctgagtatgtatcataagtggtgggggaggcaaaaggaaagtccccttgcatgaaggctaagatgtctcctattaaccacatcaactggatgccctgtcaggagttggatgtatatgtatctttacatgtctagtaaactcgtagaaaggtctaacacaaatttttttgcagggccctgagaatcctcttatgaaacgactcattctagaaacagcatgaattgctggacccaggaataaagcctgagttaggaaggagaagcggtgattctgtgctgtgcaaccattgggtgcaagtttaattccaagggagagacagtgctataaaataaaagatggaagacttcttctcctatattctgtaacacactggagcccaggcaacactgctatgacatgccatcataacagatagcaacataaaagggagagagccattcttccacactctgcccatgatggcaccagttgggcctggggtgcacatggtgcccagtggcactgaccagaaacaatgggaggttccctgggacccagaaaaacaaagtagcagcagtcctggccaatttagataccactttaatatctttccttgctgggattctcataaatatctgggaggagacttggtagaggtttggacttccgtgtctgatgaagaagtgaaatttgggtattgatgtcaatgtggttctattttcatcctgaggctggtaagctctgaagaaatttcaaattacaaccataatatgtcaggaggtaacctagagaagaagtaaagcactgtttgggaaatacagggctaattcagtttgcctggaacttagaatctatggaagttattggagaagttattggcatgaaaggtaggttccttcaaggtgctatgctaccaacccagaaggacaggctaaggggtatggacttttaagacttattcaataggaaaaggagaagtgctgaaaatgttttaacatacaatggcatgctcaaaactgtgttttaggaagattaattttccagcaagatcaaaaaatatcataaaatggagagagcaaatgaagatcagaaaacaagttcaaccacctctaaaagagtccaggttagccgaaataagggcagtcgctatgggattgattcaagagcaactgtgaagtagaattgatgaggacttggcattacatcagacacatcactaaatgatgtttgcaatcacacaatatacccatgtaacaaacctacacgtttaccccctgaatcttaaataaaagttgaaattatttttaaaaaataaaataaagggcaaataactgatttcattcacaatgaaaaaagtttccaaataatgatatgctatgacttgctaatatatattaaactttctgaaatttaatgcaattgaaattgaatccataatgacacctggaaaatctgtacctattaaattcttcagtgttgtcataacttgagtatgaaagccctaaaagagaaaaactttctttatatacatcctacttttttttctttttatttatttaaaaggaaaaaaatgtccttaaaagagaggttaaaatatgtcattttccagaccttcagattgctacactggtcacgtgaagagaaatctgaaaactatacaggtgtcttgttctaaagaatctgggaagtcagacttcaagcgtcatttctccagattctgtgtgttggggattggagtgggagttgaaataggtccctaatcacacatctatgagacatctgggggtaagaactgtgaatttcatgatattataggctatgagattgttttatatactggctattagacctagggccctgtgaataggctgagagtgagggcaagcctcaaatcttcctgaaagatgaccactggctctgttttgagatggcaatttccctagttcagagaaaagggatttatacatcaattgaataaatcattcttcaattaagtgattccaaaacaagatgaagaaagcagcctctccaataaacttaataattacaccattcaagggtacatctctcctgttggaaagccattgccaaagattaacagaatagctggtgtccacttgctgagcagcattcctgtaacctgtgtcccaggattatgatgtggtgagaagacccgctacgtaacaaactggaggaggaggaactcttctaatttctttgaactttaagagttataaataaatgtgtcttttaaccatggggctttttatttacttttgtttttataggtaaatatgcttcttgtaaaatagaatacaacaaaatataaatgtacaaaaacttgcttcctattacccactctcacccccaaactcctctctctttctgtctttttctcttcctcttcctctccctctctctctctctctctttttttttttttttttttttttctgagatggagtttcactctgtcgcccaggctggagtgcagtggcacgatctcagctcgctgcaacttccacctcccgggttcaagcaattctcctgcctcagcctccccagcagctgggactacaggcacctgccaccatgcctggctaatttttgtaattttagtagagacggggtttcaccatgttggccaggatggtcctgatctcctgacctcgtgagccacccacctcggcctcccaaagtgctgggattacaggtgtgagccactgtgcccagcctgtttattattaatatgtatagctccaccttgttcttttgagttgccacataacattctacagtgtgaacacatcctatttacttaacctttccattattaacagacatataggttttctctagttttcacttttacaaacaatactgccctgaacatccttgcagggacaactttgtatactgctgtaagtcttcctgtaagacaaattcctagaaatggaattgcaaaactctcctcccttgtgaacaacactccattctgattaatccacaggctaccatactggccaaatgtcaattgtcccagccttaaaagtcaggcatccagtagttctctccccactctccctccacctcttacttccttctgcatgctgccactagctggtcctgcttgaggcagctcgtttcacagtctactagttttatgtgcagaggatctggctgagcaaaaagaagcaagaattggtgccataaacataaaaccagctttcaaaacaatgatctgagaaataggctactgagaaataataggcaatgaaataggtacctttagatcataaagtagactaaatggcttcgtatagtccccattagctctattttgattctttgcctcattgcttcaaatgctgagtactgggtagaaggaggaatttctagatgttttggtagattatcttttctaactgataaattttttaaattgggcaactttttcctgatgttttcaccaggagaaacagatggactggtaccaagtattcaccatagacaccatacctcatttaatcctcaaaacactcctgggaaggagtagatgatgtaactgaggctcagcgatgattaggtgactttcctgctattgaatgagtctcaacattctaaagcatgtcacccctatgccaaagcccatgtttctttcactatttgataaaagtgtcatagtcttagcccagaccactttctccaggtaagtcgtcaaacaatcttttactaatgcatctcctccccaggataaggaaggaaccaaaagacagaatagtattttatttctgagctggactcttggtctgttttttgcatttatttctaacaattatttgccatatttttgcatcattgctatggtattttcttcctcatcttgctcatatgtgggtaactgtcccaacattttatttgctctgatacaatgttggtgacttctttacttttgttttctaatgagctgatattaaaataacaatggaagagaatgttgaagttgtttgctctagatttagggattaaatttttaatattcctagtaccagttttctctaattactagaaaaacaccatactggccatagaaagagccccctagaggctaattggcatttatttgtttctgttggaattcagatcccctctatagacagataaaaggatagaagataaaaggagttcagattcacagtctacaaagtcataaaatttatactggcaaaatgtaagaatatacaagaaagatttcgatacatttaagaatgatagctccaacaaggaactataaggaagatattaagaatttcttggttattatacataaacagagactgacaagaaaaagaacaactgccatatgctccctcccctcataagtgcctcgtggtgaaactgagtagtaatatgatcgatctgagacagaatggtattttttatgtccacatgtgttccctttacttgctctggcattaaggttctctctatccagtgatgcaatagacagttgctggttttgcaactctatgcactctacattttgtaatatcatcctaattttgctttgtagagttattccctcctctactctaccttttatttacacttgaagtctatctgcaccaagtcagaatgaaacctaagctaatgggtgcattctgttgctcctgccatagcaatacatttacagatagacacgtgatctaacccagtccaatcagaaacagagaggctcaattacaggacttttgtgtaacttttcatgagaaaacagactttctggctgggcaaggtggctcaagcctgtaatctcagcactttgggaggctgaggcaggtggatcacctgaggtcaggagttcgaaaccagcctggctaacatggtgaagctccgtctctactaaaaatacaaaaattagctgggcatagtggcgggcacctgtaatcccggctacttgggaggctgaggtgggagaattgcttgaacctgggaggcggaggttgcagtgagccaagattgcgccactgcactccaggctgggcaacagagtgagacagactccatctcaaaaaaaaaaaaaaagaaagaaagaaaaagaaaaaaggaaaacagactttctcaacagacttgaatctgagaggatgcaaggccagaacagctgtagccattttattgccacatagaatctgagaataaaactaacacatggggaaatgcaaaataaagccaagagctgggaagaaactaagacatgctgatgatgtgttttcagtcctcagtctagtttcatcctatctacctagatattcagcctggatttattatttatattatccagtgcattttcttctttaagctaatttgagctgggacttctggtcacttgcaactgtaaaagtctcaagtgatacagaaatgcccagaagtagggcatttttaaatgacaggttctaagatgtagaattagctgaactgaggtgatgtggaatacattcaacccacctaaactacactactactatttttgataggaaacacacaggatgttagaatggatcgtctaaccttggttatttcaataagaaatagaaaagcttaagttggaactggtccttgtgaaagtacagactgaagaagatacctctttgcctcggaaagctcacccttttcggcatgtaatagaatgtggaggcagaatccaagttcaactgagggctggacaatggacaaagccctgtcctatttttaggagagagaaagtttcaggctggattatagagtcaatgattaactagtcattggttatttggcactggagttcagtaaacagaaataggttgaaattcattttgttttaagaaatgtatatttctagagaaactcatgcttggcaaactacaagaacccatgattatttgtccattaaggcaatccatcgactcctaaaccaatgaattatgaaacagacttgtaattgttacagcccccatgatagctttctccccaaatccctttttagacgtggccacatttgtcaatcaacaaggtatgccctcctgtaaatacgccttaagtaaactagattggctgaccccagagctaacatttctggcaagaaaagggaatcttattactcctcttcattaagattatgtgctataaaatggtggccactgtgtaatgtttcctatattccctttttccaaatgagtttaaattatttttattgtagttactctttccttttctatcattctatattgggataatcaaacatcattcagcagtaattcatccaaccatgtagagcaacaagagcaacattcatgtccaactgagagaactgaacgccgctgaagaatctgtatgttgaggttagatcgagtcacttgataatactttgggtgttcttctttcaggggaaggggagagctggatgacaggaactaaaatcatccccatgcataaaagagaatcatatccaatgtcacactgtgaaataggagctgaggcagaacttgcccacagggaaagggggcatcgttaactgtgtatatgtggtggctggagacagagaatgccatgtggacagaagctgacaagctccctgacagctgaatgagtggatctgttgtctctactaccgttgcaggacaggaaccctaaatttccaactgtacacctagttctagattgcaggtcctgagattagtggaagataacttcgaaaatgccaaacaggatagaattagcatagcgaagaagacaagaaatttccactcaagataaaaatgtgaataaaaatttcagagcaaggaaagagaatgaacacaaagagccagccaacaaacttaattatggagaaattaattcatggctctcaaaatacaattgtaggccaggcatggtggctcacgcctgtaatccaagcactttgagaggccaaggtgggcagatcatgaggtcaagattcaagaccagcctggcaaacatgatgaaactctgtctctactaagaatacaaaaattagctgggcgtggtggtgtgtgcctgtaatcccagctactcgggaggctgaggcaggagaatcacttgaacccaggaggtgtttgtcacagtgagccgagatcgcaccactgcactccagcctgggtgacagagcaagtctctgtctcaaaaaaaaaaaaaaaatacaattgtaaactgcactcaaaaaatcactttaagtatgtacatttaagaacttcaagaaaataagtgaagcaatagcatgctttacaatcaacaaaaaaagtagggaaaaggcagattagattaagaaccaatggacatgaaaaataaccaattgaaaattctgtaaatgaaaaatatagtcatagaaatacaaacattttatgaattggatatacaggtggtcctcactttgcacagtgttgtgctagccaaacctcatgcaaccatgtcttcactttgcatgattctgtgataactgaggacagggttctgatatgcataggtttcagttaacatagcatcatgcaaaccaaggatggcctgtactctggcctgggcaaaataaaaaactgaattagtgaatactggaaactagcacaaaaatttgatgataaatacagaccaataaagatattaaaatatgaatgagaaatgaagagaaatagagattagattaaaggattttactaaatgtataatatatgaggctctccaaaagaatagaacaatattgaaagactggtaaaggattaagaattgaagaaaaatgtcagattttttaagtgcctattaaatgatagaaaggataagtgaaataaaacctagcttgacaaagcaaaggtagcacagttatggaacgaaaggataaaaaaaaatcataaaagctaacagaaaaaaaggacaaaaatcttagaaagtaaaaattatacttatagcagactcccctttcccagcaatacatgccaaaagacaatgaagtaaggtcttcaaagtgctaaaaagaaattactaataaaatgtaattttatacccagctaaaaatcattcaagagcacttacataatatagacatttaaaacctacaaaactccactgatgcttgataaaagaactactcaaagacatactatagcaaggaaaagagtgaacccttggagaggaatgcaataaagaacaaataaagcctatgaaagagatgtcagtgaaaccatgcagagaatttgatgtctgatttctaaagttcatagatgtctgactcacatatgagaaagctaaagtagcctgggacagcagagtagaggctatgtctgggaagcaatggactcacctccaaccataggacagaggtgcatgaatccaagggattaaatagggatctggaatagctatgtcaagggagcaaaaatcaaacagaattagtagagaaatcctcaaagagcctgtaaaagtgctcatgagagaaagatttgttcttaaatacctgtcaggtccagagagcccagaacaatcttttaatagttctggtcaagaattttccaatccccatttcctttctccctcctcttgctttaacacaggtggggaaggcaagagcaatggatggataaaggaagaagaaagagaggagctcatgatgtctttccttcccagatggcatgttcttgtctgcaccagacgctgaatgggagaagagcaaaaacacaaataccacattaagatggaagtttcaccttaaagtaatcataactcttttgtttgtttgtttgagacagggtattactctgtcacccaggctggagtgcaggggtacaatcacttcagcctcaacctcccaggctcaagcaatcctcccatctcagctcccagagtagctgggactatagatgctccatcatgcctggctaatctttttttaattattattattactttttttttcagaaacagggtttcaccatgttgcccaggctggtctcgaactcctgggctcaagggatctgccagccttggcctcccaaagtgctggtattacaggtgtgagccacagtgattgacccataacattttattatctgtaaccattgactacccaagttttcgaccaggagtagggaaaggatcaccctcactgagaaagttcagcgagagacaaaaatgaagttgcttttggcttttaccataacaccctggttcaacactaatttcaaatactgctagtagttggggccacagatctaaaataggcccgtaggccctgccttcactccttcatgtggcaaagaaaactgctcaacctacacaagcagaatatctcttttccccttcatgtcccagttccccaaaaaagggaggaaatctttccctcccatatccaacaccccttttctactccaggatgatcaatggtgggaaaagaaagcatttccttaagagagaaattcacttccttctccccacaggagtatataatctgaccgatgactcagacaagaaaatgatgagtccagagtgagtgacaatccagagtgagtttcccaaagttgtttagtcttaactaacacttcacacagaacattcctagttcagtgcaggttgagcttgaaagtacaaccaaatctttgtcatggtatctcccgccatgtgaagtggaaacaatcagaccatagtccctccttacatggcctcatttcagattttaacctgggttttaatctcctgtcaatttacacatgaagatattaacatcctctgagaacaagtaattgtcagacatggaatattcaaattcaagaataagaaataaaaaatatgtctacggaggcatggttttaaagatggacccaaattatattcctaaatacctatctgggataagaaaaacacaggtttttcttatctttcactctcattctcatatcacttctgacaccagatgtatggggacagtttcccctatatattaagcaattctccaaagaacaccagctgggtgtcctacaatttaagtcaattctgacactatctacttggagacagcatcagatcccacaggttaagggctcagtctcacaagtctgccccacttcaaatgccaattgcaaaccccaggctgtgacctgtgcttctaaccaactggctataaatcagagttcccctgatatcttcctcaggtttgattatttttctggatgactcacagaactcaaggaaacacttaacacttaccagttaccataaaggatattacaagggatacagatgaacagttaaatggaagaggtgcgcagggcgaggcatatgggaagcggtttggagagagtccatgtcctcaataggcatgccaccctcctggtacctccatgtattcaacaatctaaacccagttctttggagtgtttttacagaagcctcattatgtaggcatgattgtttacaatccctggccattggtgttcaattcagctttcagtcccttgccccgtcccctccctggaggttggtggggtagtcccaatcatctaatcacaccttggtctttctagtgaccagcccacatcctgaagctatgtagggactactagccaccagtcacctcattagcatacaaaagacactcttattactatggacattccaggggttttaggagttgtgtgccaggaaccaagagcagagaccaaatacatatttcttattataacacaatatcacaataccatttgatatcttaatctagagtatcgccattcaggtcattgtgtaaataaaggaaatctattcaaaagttttttgaaacattaattaaattaaattaatttaatttaatttaataaagtaaattaaaattttcacttccaggccaggcgcggttgctcacgtctgtaatcccagtactttgggaggccaaggcgggtggatcacttgaggtcaggagtttgagagcagcatggccaacaggatgaaaccccatctctactaaaagtacaaaaattaaccaggcatggtggggtatgcctgtaatcccagctactcaggaggctgaggcaggagaatcacttgaacctggaggcagagcttgcagtgggccaagattgtgccactgcactccagcctgggccacagagggagactccatctcaaaaaaaaaaaaaaaatcttttccaaaaacagatattagtagcatttttaaagtgacatttcactatctaaagaactaaaaccattagtctcgccaagcgtcccattatatccatcttttcagcatctggagcattgacatgcatgtctatagtggaaacctcgtccttttgtcacatatacagaggacacctgattcactgattagtgttatgtgacagggtgacaacaaatgtaaatagactaaaccatcacattttccttcccaagtccattttatcttttaaggtttgacccagtgtttttgttgttgttgttgtttgtttttttgtttttaatatactatgactagcttttcagcagaagaaattttgaatctatctcccaaaattatttgattcttgtaggcaactagttctgctctgccccttgagtatcagctattgtagatggcgcaggactgtcacaaaatttgcggctcaggttgttctcatgttatcaaatggtccttgacactgtcaagttgggtgggtgttgtgccattgcttttcccccatctgagggtagtgccatttataaaaatactctgaaatctctaatccccgcaatgaccactcctaactgctgcctccttgagctcaacagagatttgtgctccaacaacttctcttactagcaccatagcatggatctttcttccttccactctgtgaacctcaatagtatggcaccgcctttatccctcaaatgtatttttgtttgtttgtttgtttgtttgtttgttttggagatagagtcttactctgtcacccatgctggagtgcagtggcacaatcacagttcactgggaggatcacttgacctcccaggctcaagtgattctcccacctcagcttccccagcacatgtcacaacacccagctaatttttgtatattttgtaaagacactacagtttagccacgttgcctagctggtctcaaactcctggcctcaaaagattctcccaccttgaccttccaaagtgttgggattacaggcatgagccaccatgcccagcctcaaattattttcatcttctccttaattatttccatccatgttgtggggccagggattgcctaactccagacaggctgtcactcttttctcctttgacttcttaggtaacatcactttttatgcttgaggctggctttgaaatgttaatatcttgttaagactccagtcacatttgaatgaaaagggaattttatgggtagatctggaaatctattgcttatatcatcattttcatgagaatgaatatttcaagtttaaatataagtggaaggagctagctagggctaccagacatttttgccaagtcagcagacctgttagagaaccctaaagaagaaacagaaagtaagaaagaaacaaacagagcccacagagaacattcagggaacattcagggatccaataatggacgatgtttctccagtggctcttatgtaaacccctatctcctgcatacactgctgcacctctccttaggttaaagccccttctttctcccagcctctgttgctccctgccaggacctttgatcctttccagcttccactgtgagttggatcaattacagtgtgtctccaggtcatcgcttagcttacttcacttgacaactggacattttctgcttgctcctccagatttaatctccatcctcctccattctaatctgtactctgtgagtctttttttttaattgacacaaataattgtatatatttattgggtaaaagatgatgtgttttgaaatacgtggacattgtgggatggctaaatcgactaattaacctgtgtgtggcctcacatacttatcatttttttgttgtgagaacatttaaaatctactcttttagcaatactcaagaatacattaactatagtctccatatcgtacaatagatttattgaacttttcttcctgatgaactgaaattttgtgtcctttgaccaatatctccccagcactcttcacctgcagcccctagcaatcaccattctactttctgcttctatgagttcaacatttttagattctacatataagtgagaatctgtgcctggcttatttcacttaacataatgtcctccaggttcatccatgctgtcacagataacatgtgacactttgtaagttagttaatgagatgtcagtatggtccatctaaatattaatggaaggcaagtgctcccctactgttgaacttcacttctgaaggcaggtatcagaaaaataaaggaggaaaaaactacaatgtatctaactatgacttatgttattgagaaattaaagtgcatattgaagctgtcaatctcaacattgccaaccatcattcaaacataggatgtgtttatgatgaagcatcttaaagcatcctgggaaaattacaatgatgactcccaactttccattagctaggaatgtaaagagttacaaatatgtgtccaaccataaagatatttgacatgaatatgttgagctctaaacaagaaaagtaattttggacaaaacaatatcattaaatgctgagagaagttcttctattttaataactgaatttaggaaaaacaagtccctctgctatttgctggctggattgggctaagggcggacctggtttttgtaactctccccacccttcttgggatgtgtccagcccagtgggcagccttgttctggaatatccagttaagctggattgctgtggggggtggagttacagttgcactttttcaacctaagaacaggatgcaccaacacaatccctgattttccttaatttttccagggccttgatcttcttttgggatccacagaaaactaccactggcacatgggggagttgatggtgataaattccaagggtaactgggaagaaaaacaaccaagatccactggagaagtcagttattgttaggtcaggcaacatcaacacaatagacatctgttccattgagaaaaaagaactctgttgaactgatgaagctgtcagcataagtcatgctctttgggcatgtcataaaacgacctgaccttcagagaggaggctggggtatcagaatcctcattcctaccatcagtggaatctgtcatggtagaatttctttccctgtgtggttcccccaaatgtacactgattattaacttttaaattcatagcttaggaactataggaggatctagctctgcactgaaaataatgaaattctgctggctagccaaccctcagttgttccagattcaacaggtttctattgggtatctatgcatgcaaataccagaggttcaacagttaacaagacagtcatgatccctgtgctatggatcttaagatctagttgtcctcctgttagcaatatcaccgtatcaagaatcaatcaactgttcccaattgactgagctggaatgaactgcccaatcccctccatttatcaatttaaaaataactctgaataggttatatctgtgtatatagggttcaaaactaattaaaagagaggactagaacccaggtctactgactcccagaccttccctgtttgttgatactctgccctcctttctacctactcccaaaaaaagcttaatttcccatgtagagtccttacactggtaaatgtctgctgacacatgcaggagtcaatgattattgactctggcaaaagcaatacgttgtctagtatatttaccaactactagaacacagtggtgacataaatttgtttttcatgaaactttctctatttctgaaagcaaagtccactagaaagccgaactcgtggaaagtatttcacataaaattgtatttgatggacatacttaaagggcaaatattaaattatggctttaatctctattcttttatatatgtcaagaaagcctcatcaaatcttacctttcatatgcatgaaatattcctttaaagttggcttatcagattactaaaagaacttctgtaccaaagatttttttaaaatgtgctaggctaagacaacattgtgagatatatttaggagtaggaaaaaaggctgaatttccctttttttttttccttcttctcctttcagggatccagtgaactcaatgtcctttagtaaatgtaccaggtagagcagttgaattcatgagaaaatcatcaagtagtcaatattctggttgtctcaaaaggatttctttttaaaaaaagaagacccaaggaaaacactatcaatagaaagcattgaatgctcataaggaatttaggcaataccaggaaagtgtgtttggggtgaggggaagggtgaagagggagaagtggagaaatgggagggtagagggagagagaagtggagagatgggaggggtggagagagagagaagtgtggagatgggatggtggagggagagagaagtggagagatgggagggtggagagagagagaagtggagagatgggagggtggagggggagagatggaagattggagggaaagagaagtggagagatggaagggtggagggggagagatggaaggttggagggaaacagaagtggagagatggaaggggtggagagagaagtgtggagatgggagggtggaaggagagagaagtaaggagatagggtggagagagagagaagtggagagatgaaagggtggagggaaacaggggtggagggagacagaagtggagagatggaaggggtggagagagagagaagtgtggagatgggagggtggagggagagagaagtggagagatgggaggggtcgagggagagagaagtaaggagatgaaacggtggagggagagagaagtggagagatggggggttggagggagagagaaggagatgggggtggaggaaaagagaagtggggaaataggaaggtagagggagagagaagtgaggagatgggagagaagggaaaaggaagttactttcactttttctctcaatccagtggggaagatgttgatatcagtcctatgtcatggatgaggaaattgaagttcacatttgtcgcttgctgaaggtcacgtgaccagaaatgcaaagcccgatctgactcatattctcctaattataaatgttacgtgctttctattactcaggcattgctactctttcggttgtgccaggaatggcataaccaatattgtgtttgattctcacagcaaccccagaaaatgaatgttactctaaatctcaaaattaagaaactgcctcaaagaggttaggtcattttgcatagggccccacagtaaaaacagcatttagcaaataagtgggggcaaagctctgccctttttgttacttcagtgtttccaaaacacactctggggatttgaggtgaagaaatgccacaatatcctaatccctttgaacaaggtgatctttacataaagtttgatgtgaagtgtcctgaaaacaactggaacaacccagacaaacgttctcaactagaagatccgctgccatctagatcagaagtttcaaacacaattggagaaaaagtggcggtagagcttcaggaatgtgataacacttgaggctgaggaggtggtcagaggcatgaagcctaaatcatagctctgatgaagaaaacagcagccctcatgttcctggaggtgtgtgcctgcccatccgcaaacactgcaaatgaattgcacaggaggactttccttccacacttgcctgatttgttctcagcgatcccactggagtgtcccatcaatccagatgaactgatggacatccattggtctctgcgtaacttttaaaattggtatagtatctacagcgtgtataattgaaactaaccacaaagcttcacatcttcgtttcaactgttccatagcagaataaagcacttgaaaggaaataaaactccctttcacatgtagattataagtttcgatcctgatatctgtgcttgatttttatcagttttgtgcagactttatgtctcatattttaaattcaaatcccatattgtaaagtttgtacaatttatcctgaagctttgtgtttggctgcacctgaataagctgctacaaatagaagaaagaatctcatagcctgtatctatcatttagatgtatgggaaaaataggtcttgcacacaatgagtttggagctgagtaggaacaatggaaaaaaatgacattagctgtggttgtaaagttttttgtttgtttgttttttaccatcttgtgaaaggtttctgaaactcaataacaaaaagcagttggtgttttaaaaaagttctattcttagaagcctgaacattctcttcaagaatttttacattttatatttttaaagataatacttaaaaattaatggaagcttattttgaatagccaagtaatgcaacaaagtttcagtataggctttgtactcatgtttatttatactagtggtaacagtgcttaacttctaatgtgctgacaaacatgtttggttgctattaggtcggcacatcctcatgtcaaaatgacagcaatgctctcacatttgtacctaatacctattaggtttctttgtacattgcacctagataccagttagccagctatctagcacttatcaaaaagaaaagtgctagacaatcacagggcataaagtcgtaaggggagctgaattcaagctattacccaggttaaccattgcaccaaaaattagataacatgattgctcaatatatgagccctcagcggccaaaaaaattcacaaagacaattgaaagcaatgtttaaaaaaatgactaaaaagattgggcacagaggttcatgcatgtaatcccagcattctgggaggccaaggcaggcgaatcacttgagcccaggagtttgagaccaacctaggcaatatagggagaccccgtctctaccaaaaaacaaaaaaagaagttaggtgtagtggctcatacctttagtcttagctcctcaggaagctaaggcaggaagatcacttgagcccaggagattgaggctgcagtgagccatggtcatgctactgcactccatcctgggcaacagagtaagactgtctcaaaaacaaaaaattataaaattataaacttcattaaggcttgtttgcttcattctcatgtaattattaaattctataaatcaatgggcagtgaccaaaaatagcttttattatgttttagagtatcttgtctgtcacactagactttgctgtttttgcccaagtatcctgtttacctacaggtagaaaaaccctaatgtttatttgagtatccacccctcctttatgcagcccatgtctctagcagataccgtattagacagcatattagaacattcccatcattgcagaaagttctgttggataccactgatcaagatcgcaactgagattatatactatttattaacatattttataagcttcaaagcacttctttaaaaatcctcattattatttatttatttatttatttatttttgagacagtcttgccctgtcacccaggctggagtacagtggtgtgatctgggctcactgcaacctctgcctcctgggttcaagcaattctctcacctcagtctcctgaatggctgggattacaggtgcaaccacacccagctaattttttgtatttttaatagagatgggatttcgccatgttggccaagttggtctcgaacgcctgacctcaggtgatccacctgcctcggcctcccaaagtactgggattacatgcatgagccaccgtgcctggcctcccttattattatgattattaatcattttaagtcacaggaagggagtaattttctacaaataaatggagtcctgtacagagcatggctatttccaatactagcttttaacactttaataaaatgatcattactcaattactatttaatctctgtccatcttgaagacttgtttaaaatagaatagcttcctcctagaacattatacaattcttcagctctagttactttgtgcctttcctgattgcccaacttaaatattgaaaactataaagatacttaatcagggagctttgcttcggagttaaatcagcttgactttgaactgccaaacagattaggaatggtatatagattttaactattaaagtcctagttttctatcatagagcttttgattttagaactataacaacacaaattccctggttacctaaactcattctccaaactatccatacacaggaactgaattcatctggatagcaaggaataattgtataaagaataaagcatgcccccgaaagttttctccttagaagtctctcccatagggccaagaaacaatattggccaatgacattcattccataagaaaatagatatcagtgctttttttattttactttactttattattatttttttttgagacggagtctcgctctgtcgcccaggctggagtgcagtggcgcgatctctgctcactgcaagctccgcctcctgggttcatgccattttcctgcctcagcctcccgagtagctgggactacaggagcccgccaccacgcccggctaattttttcgtatttttagtagagacggagtttcactgtattagccaggatggtctcgatctcctgacctcgtgatccgcccgcctcggcctcccaaagtgctggattacaggcgtgagccaccgtgcccggcctcagtgctttttttataagttctttctgtgccttttaaacacatattgaagggagagaatcaagtggttctgatgtgtgcaatgaagtcatttataccaatggcgatttaaaataacgtatttagaaatgcaattaaaaataaagttaaaaataaaggccgggcgtggtggctctcgtctgtaatcccaacactttgggaggccaaggtgggcagatcacctgaggtcaggagttcgagaccagcctggccaacatggtgaaaccccatctctgctaaaaatacaaaaattagccaggcgtggtggcacatgtctgtaatcccagctacttgggaggctgagccacaagaatcacttgaaggcagaggttgcagtgagcagagaccacaccattgcactccagcctaggcaacagagcaagactctgtctcaaaaataaataaataaataaacaaacaaataaataaattttaaaaatagactatgggtcgggcacagtggcttagactctcctgcttctggctcccaggtagctagaactaccacacctggctgatgttgatattttgaccacctcccatgaatcatgaatgttctttttttttttttttttgagatagggtctttctctgacacccaggctggagttcagtggcatgatctcggctcactgcaatctccgactcccaggttcatgcaatcctcctgcctcagcctccctagtagctgggactataagcatgcaccaccacacctgactaatttttgtgtttttagtagagacagggttctaccgtgttggccagggtggtctcgaactcctgaccttaggtgatcctcccaacttggcctcccaaagtgctgggattacaggcatgagccactgtgcccagcctatcatgaatgttcttaacggcatctaaaattgtgaattatttccagaagtcctctgattttactgtgcccagattcagcagaggaatcactatctttggcaattatagccttacaaactgtatttcttaaataataagacttgaaatttgaatttacttcttcatccatgggctgcagaagagatgtgttaacaggcataaagacaacatcaatatctttgtggatctccatcagagctcttgggtgactaggtatgttatcaacgagcagtaatattttgaaagaaatacctttttctgagcagtaggtcttaacagtgggcctaaaatattcagtaaatcatgctgtaaacagatgtgctgtcatcctggtttgactgttccatttatagagcacaggctgagtagatttagcatcattcttaagggccctaggacttggggaatggcaattgtgcagggctacaccagccttgtccctgggtccatcctcctaattgtagcctatggtgctggtaggcatatcactaggactaaggtttgcctaaagagtggctgcttgaaagcaaatgggtaaaacctagacatgccccaatgtccactaacacacgtaaggcccttcatgttgtaaaacaatggaggaaggggcatggaaaaaaatacggggtggactatgggtggaggttggaggtgggagttcagctctccccatactgccgaattccagaggaaaactagaagtctcagaattctaaatttcaacttcatgataacttcaggttatcatgaagccaaatttggcaatgcaggagaacggtacatattttatttaatagtttattatctgtttagacaagggatatgtgagcctctatatttattcctgccctgaccctggccccacaaatgttaggggcaggtctgtacaaggaagacaaacctcaagtgagatcaagggtcctgtgggagctggaactggacagaacgaaatctcaccaggaatgtgcagaaattctggcaaggctgttcaatatgtggtttgagctgacatctgggttacatttaaatatttggaaaatatcaaaataagataaggcaaaatatgataacactgtactccataaaaagatggtctcatccccagaaaacttaaaatcgaattaaagaacatggaaacaaagtcaaaaactacattagcaacaatttattttatattttaaaggatgagagggactattgaatacacaagcaaattacatgccacctaaaacatccagagtattacatctcgttttagttttccaggtaatagagaaatggtaaaaaccaggtaattgtcagatattatttcggtggtctgtgcctgaattttcaacacaaagcgttaagatgagatgagattatgaaaccacagtcacacctccatgtacacagaaaaccacggtgccataggttttcttcacaaggccataggaagtcctgatcagccaaattcagatcatacttgctttcagtgctcatcacattttattttattttattttattttttttggagatggagtcttgctctgttgcccaggctggagtgcagtggcgcgatctcggctcactgcaagctccaccacctgggttcacgccattctcctgcctcatcctcctgagtagctgagactacaggtgcccgccacgacacctggctaattttttgtatttttagtacaccgtgtgtttcaccatgttagccaggatggtctcgatctcctgacctcgtgatccactggcctcggcctcccaaagtgctgggattacaggagtgagccaccgcgcctggcccagattttctttcttattggctaacttcagtggcaaatggagaccaagtttggccaggttaattaggggcagcatgcaatgtacagagcattggtatagaagccaaactccctgaatgttagtctcagctctgaaccctaacaatctgtgtgaccttaggaggccattaaacctctctgtggctcatctttattttattttaattttcttttagacaagatctcattttgttgcccagcctggaatgcaatggcacaatcatagttcactgcagccttgaactcctgggctcaagccatcctcctgccttagcctccccagtagctagactatagccatgcaccaccatacctgcctactacttttttttttttttttttttttgcagagatggtagaggggggcctggatctgctgcccaggctggtctcgaactcctggcctcaatcaatcctctggccttggcctcccaaaaagttgggattacaggcatgagtcactgtgcccagcccttcatctttaaattaatgtgattatgaagccttaggcataaacattctatgggatatatgagtatgttattattttgtctctttaagtacagctgctgatggcattactttctatcaccaaaagaactgacatttatatcacagaataaaagaggacacataaaccaattctcatttctactggggataatattgaaactagagttcagaaggaatctgtatcagttataattagttgagttggaattagaaagtccatggataagcaaggtttttaggtgcacttcttcctaggtttaatttcaacaaaagaaaatgcttgcccttctcagttacgtgaagtctaggatcttgttttaatttcccaagagcccccatgaggtaagtattattattcctttattaaatgtaagtacctgcttcatgaagtgaatttaaaataaaaccatgcataaaaaagtactcagcacgatccctggtacataataaaagcaataaatgttagctattttatatacattcatacatatatatttatatctgtatattatgcatatctcatttttattatgcataatgtattacatatgttttattatctgcactagtggctttcaaattgtgctccaaagaaacaaaggttttcatgggatctacaaacaatgaaatatttgtcactaattataaaaattaatgaggagcatacttattgattttttaaaatatattttatgtattgcatgatctgtgtaagactgctagaacaatgcattttgctgctaaaactagatttttaaaccactggtataatattccaatccattaattttactggtgataaaatgaaaacacggagagctgagtttttttaatttttggctttgaacacgttaatatatctgttaggacatattcagttgcaaataacagaaaatccaaattatctgccttaaataagaaaggcaaattatcaataacataactaacaggcaggtccaaaaagagggtctaactcaaagttggcttcattccacagcccaatgacatcatcatggcctgtcttatctgctttcccctgtgagtttgatcctacacctggcttccctcatggatgcaacatggctgtaactgttccaggatttaaaaccatcacaggtcatttacaaagacagtatgtttgaatgtcagcattccaagtgagaattctaacatttaccctgtttaattaatttgagtctgaaccaattactgtttcctggggaattgaatatgccctccaggggacaccctggaagttgagttgggtgttgctcagcttcctccaaagcacactggtttcaatggatagcttatgtgctcaaacaaaagcctgggtatggttagaaaggagaaagagggaatgatcacttggtagacaacgaacaaatgtgtcctaaactatgtgactttgggtaaattacttcccttctcgtacatatagaataagatattggatttgatgagtgattgcaaatgtgaatatgcagccaggcttggtggctcaagcctgtaacatcagcactttgggaggccgaggcgggtggatcacctgacgtcaggagctcgagatcaacctgatcaacatggagaaacccccgtctctactaaaatacaaagattagctgggcatggtggcaggcacctgtaatctctgctacttgggaggctgaggcaggagaatcacttgaacctgggaggcagaagttgcagtgagccgagatcatgccactgcactccagtctggggaatagagtgtggctcggtctcaaaaagaaaaaaaaaaaaagaaagaaaaaattggtaaatgtaatttcctaaatttaagctcctttatctaatcccagcagaacttttgaagcattatccctgaataatgatttgtaattgaacatgccccagaggcacatacaagtagaagaatatacaatgtgtcacatagaatgtgagtcagcaggaaacctaaataaaacaaggattagtaccagcttgcccagttgctcagccttcaacaatggcgtgaagccatttctgaatttagcttccctgtaaatagctgcctaattccagaacctcacattaaggaagttggtgcattatttggttggcaacagtggcatagtgagggtaaaaggccccaggagccatgtaaaatatttatgccttcactatttcaatgctgctacttgaagtgctagattttgcagcatctagtgccttgtggactcccataaatcagatccctgtatgtctcactgtgacccatcttctcttttctctgattgtcagtgtctggtagaaatgatcccctcagagaactattattggagaacaaaactctactatcatccaattatcagtgcataacttcttttttttttaagacagggtctggctctgtctcccaggctggagtccagtggcacgatctcactcactgcaaactgtgccttcatggctcaagcgattcttgtatctcaacctcctgagtagctaggactacaggcgtgagaccccatgcttagctaatttttttatttttagtagagatggggtttcaccacattggccaggctggtctcgagctcctgacttcaggtgatctgcccaactcggcctcccaaagtgctgggattacaggcgtgagccactgtgcctggccacatttaccaattttaatatccttgtattttagaattcggtgtctagcgggcaataggatcatcatggcagatgggaggcaagactagattgcagctccggacatagaagcttgcggagacacacgttgtgaattttagctccaaattaactgtaagaacaaaccagcaatcccaagaggacccacagaccctctgaaggaagcggactgctcctgcaggacatgggagacaccccaaatactgtgggtgccccaactgtggaagtgggaaagggagagcctcctctcctgaatacacacccccccactggagaagctgaaagtatgtttgcaggagaagtttccaactttacctagagctgagtcaatttagagagccgagcaaaatataggggtagaggaagcagcagaaaggccctggtagctcactgggtccccgagagggccattcctgcctggcaccatggggatccatcggcagagcagccagaggagtggggttgtgggggtaaaactccacagggagaaggaaatctctagctgaactgtgaaacgatttgaatagggcgaaaagcctcctggccagaacttgggggagggcacaaatccagtgtgcagattccacagttgggggaagaaccaagccctttcctttcacagctgggaggctgtagcctgaagcaggttttcaagcctgtcttgccctctgcctggaaacagacttggggctattggggttggggtgggggcacagtgggagtgagaccagccctttggtttgcatgggagctgggtgaggcctgtgactgccggctttccccaagtaccctgacaacctgcatgactcagcagaggcagccataatatttcttaggtatacaattccagtgacctgggaatctcacccccatctgccacagcagccatagcaagacccacccaaggagagtctgagcttagacatgcctagcgctgcccccagctgatggtccttctcctcccaccctggtagtagaagacaaagggcatataatcttgggagttctagggccccacccaccaccactacctctccatactaccacagctgatgatctctggaaagtaccacctcccagcaggaagccaaccagcacaaaatagagcattaaaccaccaaagctaagaaccctcatgaagcccattgcaccaccccgccacctccaccggaacaggcactggcatccacagctgagagacccatagacagttcacatcacaggactctgcagacaacccccagtaccagcccagagctgggtagactttctgggtggctagaccgggaaagaaacaataatcactgcagtttagctcacagaaagccacgtccataggaaaagggagacagtctacatcaagagaacaccccatgggacaaaagaatctgaacaagagtattcagctcaagaccttccctctgacagagcctatgcaaatgagaaggaaccagaaaaccaaccctggtaatatgacaaaacaagcctcgttaacatcccccaaaaatcacactaggtcaacagaactggatccaaatcaagaagaaatccctgatttacctgaaaaagaattcaggaggttagttattaagctaatcagggaggcaccagagaaaggcaaagcccagtgcaaggaaatctaaaaaaaagatacaagaagtaaagggagaaatattcaaggaaataaatagcttaaagaaaaagacaatcaaaaattcaggaaacattggacatacttacagaaatgcaaaatgctctggaaagtctcagcaatagaactgaacaagtagaagaaagaaattcagagctcaaagacaaggtctttgaattaacccaatccaatacacacaaaggaaaaagaataagaaaatacgaacaaagcatctaagaggtctgagattacgttaaatgaccaaacctaagaataattggtgttcctgaggaagaagagaattctaaaaccttggaaaacatacttgggggaataatcaaggaaaattccccagccttgctagagacctagacatccaaacacaagaagcaaaaagaacacctgggaaattcatcacaaaaagatcataacctaggcacattatcttcaggttatccaaagttaagacaaaggaaatagtcttaagagctctgagacagaagcaccaagtaacctataaagaaaaacctatcagattaacagcagatttctcagcagaaaccttacaagctggaagggattggggccctatcttcagcctcctcaaataaaacaattatcagccaagaattttatatccagcaaaactaagcatcacatatgaaggaaagatacagtctttttcagacaaacacatacatgtcaagagaatttgccactaccaaaccagcactacaagaactactaaaaaggaactctaaatgttgaaacaaatcctggaaacacatcaatacataacctctttaaagcataaatcacacaggacctataaaacaaaaatacaggttaaaagcaaaaacaaaaaaaacacaaagtacacaggcaacaaatagcacaatgaatgcaacagtacctcccattttaatactaacattgaatgtaaataacctaaatgctccatttaaaagatacagaactgcagaatgcataaaaactcaccaaccaataatctgctgccttcaggactcacctaacatgtaaggactcacataaacttaaagtaaaggggtggaaaaaggcatttcatgcaaatggacaccaaaagtgagcaggagtagctactcttataacagacaaaacaaactttaaatcaacagcagttaaaagagacaaagagggacattatgtaatggtaaaaggccttgtccaacaggaaaatatcacagtcctaaacatatatgcacctaacactggagctcccaaatttataaaacagttactaatagactgaagaaatgagatagacagcaacgcaataatagtgggggacttcaatacaccactgacagcactagacaggtcatcaagacagaaagccaacaaagaaacaatggatttaaactatactttggaacaaatggacttaacagatatatacagaacatttcatccaacaactgcagaatatacattctatttaacagtgcatagaacctcctccaagatagaccatatgataggccataaaacaaacctcaataaatttaagaaaattgaaattatgtaagcactctctcaaaccacagtggaatacaactggaaatcaactccaaaaggaaccttcaaaaccatgcaaatacatggaaaataaataacctgctcccgaacgagcattgggtccaaaacgaaatcaagatggaaattaaaaaattattcaaactgaacaacaataatgatataccctcccaaaacctctgggatacagcaaaggtagtgctaaaagaaagtttatagccctaaacccctacatcaaaaattctggaagagcacaaacagacaatcaaaggttgcacctcaaggaactagagaagcaagaacaaaccaaacccaaacccagcagaagaaaggaaataaccaagatcagagcagaagtaaacgaaattgaaacacactaaaaaatacaaaagataaatgaaacaaaaatctggttctttgaaaagataaataagattgctagaccattagcaagattaaccaagaaaagaagagagaaaatccaaataacctcactaagaaatgaaacaggcaatattacaactgacaccactgaaatataaaagatcattcaaggctactatgaaacctttacacatataaactagaaaactagaagagatggatacattcctggaaaaatacaaccctcctagcttaaatcaggcagaattagataccctgaacagaccaataaaaagcagcaagattgaaatggcaatttaaaaattaccaacaaaagaaagtccaagaccaaatgggttcacagcagaattctaccagacattcaaagaagaattggtaccaatctttttgacactattccacaagataaagaaagaaggaaccctccctaattcattctatgaagccagtgtcaccctaataccaaaaccaggaaagggcataaccaaaaaacaaaacgatagaccgatatccttgatgaacatagatgctgacatccttaacaaaatactacctaactgaatccaacagcatatcaaaaagataatccaccatgatcaagtgggtttcataccagggatgcaggaatggtttaaaatacacaagtgaataaacgtgatacaccacataagcagaattaaaaacaaaaaatcacatgatcatctcaatggatgcagaaaaaggattcaacaaaatccagcatccctttatgattaaaactctcagcaaaatcagcatacaaggaacacaccttgtatgtataaaaatgtaataaaagccaactatgacaaacccacagtcaacataataccaaatggggaaaagttgaaagcattccctctgagaagctgaaagcattccctctgagaactggaacaagacaaggatgcccactctcaccactcttcttcaacacagtactggaagtcctagccagagcaatcagacaagagaaagagataaaaggaatccaaattggtaaagaggaagtcaaactgtcactgtttgctgatgatatgattatgtaccttgaaaaccctaaagactcctccagaaagctcctagaatggataaaagaatccaacaaagtttctggatacaagactcatgtacacaaatcagtagctcttctatacacgaatagtgaccaagtggagaatcaaatcagaactcaacccttttacaatagctgcaaaaataaaataaaatacttagcaatatacctaaccaaggagtcaaaagacctctacaagagaaactacaaaacactgctgaaagaaatcacagatgacacaaacaaatggaaacacatcccatgctcatggataggtagaatcaatattatgaaaatgaccacactgccaaaagcaatctacaaattcaatgcaatccccatcaaaataccaccatcattcttcacagaattagaaaaacaattctgaaatttatatggaaccaaaaaggagccagcatagccaaagcaagactaagcaaaaagaacaaatctggaggcatcacactacctgatttcaaactctactataaggccatagtcagaagaacaatgtggtactggtataaaaatagacacatagacctatacagaataggaacagaatagagaacccagaaataaatccaaatacttacagccaactgatcttgacaaagcaaacaaaaacataaagtggggaaaggacacccttttcaacaaatggtgctgggataattggctagccacaggtaggagaatgaaactggatcctcatccctcatcttatacacaaatcaactcaagatggattaaggacttaaacctaagacctgaaactacaaacatcctagaagataacattggaaaaacccttctagacataggcttaggcaaggatttcatgaccaagaacccaaaaacaaatgcaataaaaacaaagataaatagttgggacttaattagactaaaaacttttgcactgcaaaaggaacagccagcagagtaaacagacaacccatggagtgggagaaaatcttcacaatctatacatctgacaaaggactaatacccagaatctacaacgaactcaaacaaatcagtaagaaaaaaaaacaatcccatcaaatagtgggctaaggatatgaatagacaattatcaaaagaagatacacaaatggccaacaaacatatgaaaaaatgttcaacatcactaatgatcagggaaatgcaaatcaaaaccacaatgcgatactaccttactcctgcaagaatggccataatcaaaatatcaaaaaacagtaaatgttggtgtggctgcagtgatcagggaacacttctacactgctggtcggaatgtaaactagtacagccattatggaaaacagtgtggagattccttaaagaactaaaagtagaactatggtttgatccagcaatcccactactgtgtgtctacccagtggaaaagaagtcattatataaaaaagatgcttgcacatgcaggtttatagcagcacaattcacaattgcaaaatggtggaatcaacccaaattcccatcaatcaatgagtggataaagaaactgtggtgtatgtacatatatgatggaatactactgagccataaaaaggaattaattagcagcatttgcagtgacctgaatgagactagagactattattctaagtgaagtaactcaggaatggaaaaccaaacatcatatggtctcactgatatgtggtagctaagctgtaaggatgcaaaagcataagaatgatacaatagactttggggactttgggggaacagtgcgagaggggcaagggataaaagagtacaaatatgctgcagtgtatactgctcaggtgatgggtgcaccaaaatctcacaaatcaccactaaagaactttctcatgtaaccaaataccacctgtacctcaataacttacgaaaaaaaaaagatgcacatttccaaactacaaaaaaaaaaagatgtttaggaaagcagtgttggataatataaaaaatccagaccttggtgataaatagatttgggttccagtccctgttcttttccttcaactatagcagttcggccttaacttataactgtgagtaatatttgtacctacttcttagggtttttgtgagaactatgggagttattcatctaaagcacttagcacaatgcttagcacttaataaaacaaattaaattaataaaccaaattaaccaaattaaatcggcaatggcaatgtaagattggcctgcaagagatatagtgggagtactggtagtagtaaagatctgggttaatgtagggagctatccttttatcttagtgctgctaactgaacttcagttttcctctgaggagccacctacaccctcccccgttctcaatccatgaaatccaggatgagttgacaccaacctaggttccagtagtcaagatgtaagtaaaacttgatcatcgatcagttcattttattccactagcacggtgatggcgttagaggtgagaacatgacccagtgagagccaataagatacaatgacagttttgcttaaaaagctgagagaaagaagcctaacatcattctgttgtactcaaagcttgagtagggtgccctgtggctttcggcagttactttccctcacatgaaaaaaaagcagggaaaaagccaacacagagaaataatgatgaaaagaaatagtcctggtgacataatttgatgactacattcacttgtgctgaagttatggttaaacaagacaataagttccattttgggcttatactatttttgtagtcaaaagaactggaactgatatactcagatgcattttttaaaaatatttatgttagaaaatagccccacaaactattcaacacatttctaaaggtagtatgtaattaaagagaaaaagtgcatatgaccatttcaataggtgcaaaaaaaactcaaattttaatatccattaattttttttttaaataacaaactaggaaaaagaaggaatctctcttaatctaataggcggtatctggaaaaataaaaccatagcaaataattgacttagtggtgaatcatttaaaagctttcccttccagactgaaaacaagacaaagattacactgatcacaacatttactaaacattgttggttatattgaaggctgtagatggtgcagtaaagcaaagaaagaaagagagaaaaaaaacaatttgaaaagaagtaaccaaacatcatttttagattgtataattatgcacacaggaaatccaaaagaatctactgatacataattggagtaataagaaagtttagcatggttgctggatacaaagacaatatacaaaaatcaacagcatttctatactaaaaataaacaattagaaaattaaatttttaaagtgatagtataaacaatagaatcagtaatggtaagtacatagaaataaatcatttttagaaggttcaagcctcttcaggggtcttgtgcctttaaaaaaaaaatttggccaggtgcggtggctcacgcctgtaatcccagaactttgggaggctgaggcaggcagattgcctgagctcaggagtttgagaccagcctgggcaacacagtgaaaccctgtctctcctaaaatacaaaaaattagccagggaaaaaattagccaggcgtggtggcgggcacctgtagtcctagctacttgggaggctgaggcaggagaattgcttgaacctaggaggcaaaggttgcagtgagctgagattgtgccactgcactccagcctgggtgacagagtgagactccatttccaaaaaaaaaaaaatttttaattttaataaaatttaattataaattaggtttttaaaaaattattatgaaatgtaattataaattttataactatgttgaagtatattaaaggacacatgattaaatggaaattcataccatattcattgactgaaagattcaacagggtttgggattttgttttgttttaaaacttgacaagctggttttaaaacatatatgataatgtaaagggccaaaagtatccaagacaatcttgaataagtagaaaaatgtcagaggatttgctctaagagatatcaagatatatagatatcaaagctacagtagttaaaacaatgtagaattgatacagtgatagacaaaccaagagctaacataaaagagaaactaaaaagagactcacacttatgtggaccttgatttagacagagtggcaatacagtgtatgaggaaaatgacaagtatttttaatactaatgctgagacactcaattatatatgtaagaagaaataaaattggacttgaaaagatgctgacctcattggtaagaaggaaaatgcaatttaaaaatcacagtgagacaccgctacacactcatcagaatggttaaaatgtaaaccatctgatgtttattgcggcactattcacaatagcaaagacttggaaccaacccaaatgtccatcagtgatagactggatttaaaaaatgtggcacatacacaccatagaatactatgtagccataaaaaaggatgagttcatgtcctttgtagggacatggatgaagctggaaaccattagtctgagcaaactatcacaaggacagaaaatcaaacaccgcatgttctcactcataggtgggaattgaacaatgagaacacttggacacacgttccccacagggtggggaacatcacacactggcgcctgtcgtggggtggggggaggggggagggatagcattaggagatatacctaatgtaaatggtgagttagtgggtgcagcacaccaacatggcacatgtatacatatgtaacaaacctgcacgttgtgcatatgtaccctagaacttaaagcacaataaaaaaaaacggtaaaaataaatttggatattaaatttaaaaaaaatgtaaaccatctgaaataccaagtgttggtgagggtgtaaaacaatgggtatcctcggccaggcacggtggctcacgcctgtaatcccagtactttgggaggccgaggcgggcagattacgaggtcaggagatcgagaccatcgtggctaacacggtgaaaccccgtctctactaaaaatacaaaaattagccgggcgtggtggtgggcgcctgtagtcccagctactcaggaggctgaagcaggagaatggcatgatggcatgaaccagggaggcggagcttgcagtgagcctagatcacaccactgcactccagcctgggcgacagagcgagactccgtctccaaaaaaaaaaaaaatgggtatcctcatgtactgttgataggagtgtaaatgggttcaaacactttggaaaaagatggcattattttttaatggggaagcaatgcatatcctgtgacctagcaatttaatttcactccagatacataacatataggaatgtaggtatgtctgtgtatacaagaatatacatagagacatgtacatggtttgtaataactgaaaactggaaataatccaaacatccagcaacaggagaatgcaacttttgtgtgatattttcatgcaatggaatgctatatagcaatgcaaataaacaacagctacataccacatgagtggatgttaaaaacagtcaagaaacaagacaacaaaaacactgcaaaattacatactaaaattgaaaatgggcaaacttaaaatgcattgtttaggatgcttacaaaggtggaaaaattataaagaaaagcaaggatgtgattactataaatgtaagagagaaaaaaaagtgatgcagacaggaagaagtagcaggatggagaaatcacataaaaagtcatacaaagggaggtctggggactgtcaatttccattggtgctattcagcaggacttcctgtaatgaagaaactgctctagatctgagatgtccaacactacagcttcttgtcatatgtggctactgagaactggaaatgtggctagtgtgactgaggagataaattttaatattatttcggccaggcgtggtggctcaggcctgtaatcccagcactttgggaggctgaggtgggtggatcacctgaggtcaggagttcaagatcagcctggccaacatggtgaaaccccatctctactaaaaatacaaaaattagctgggcatggtggcaggcacctgtaatcccagctacttgggaggctgaggcaggagaatcgcttgaacccaggaggcagaggctgcagtaagctgagatcgtaccattgcactccagcctgggcgacagagcaagactccgtctcaagaaaaaaaaattaatattatttcattttagttatttaaaatttaaatataaatagcccaatggctgctgttttggacaatgcagcatctagtttgtatcgatcaagtttccaaagggaaacagagggctcactcaaaatagagtagtggtctttaaaaggtttcagagaagaaaaaagaaacaaaagaaaaatagagtcatttaaggaggattcatttatgagacagctaatcacaaaggtacaggtataggggagacacaagagatggttttgcaacctaaggctaatggtagccaaccattaatgtgaccatccctagacctgaagggacaaggaaaagatgtgattcctagaaggagagaaaattaagtagattctgccatgttaagaggagcagtgacctttagtggagaaacccagtcagccagaggtaatatcacattaggagccaagggaatataagccttaacaccactctcttttcctccctacaatctcctgctgtgtctccccatcagccaggcccaagaggaagtcagaggggaaaattgctcacagatccacacaggtcagtctcccagatcaatgtcagatggtggctagatctaggggacaaataaaagatgcccagcacatggatcttgactgagatgcttgctgcgttattattacactatacattttttactgtaagagattatagtataaaaaagaaaagggagaagagaaggtagaaaggaaagaaggaaaaggaaggagagaagggaaggaaggaagcaagcaaggagggaggaagaagggagggaaggaaggaactaaaagaggaaaaattaaaaagaaagtgaatagaaaggaaagaaaataaacccgaccaactagctcctgcattatgtactagtaagaatctgatggatttatcaactgaaaaatagtaaccaaaagtctgaataaatggttgtcatcaaatgtttttgtcaagtcagtaaaataatacagcaatttttttttttttttagacggagtctcgctctttcacccaggccggactgcggtggcgctatctcggctcactgcaacctctgcctcctgggttcacgccattctcctgcctcagcctcccgagtagctgggactacaggcgcccgccaccacgcccggctaattttttgtatttttagtagaaacagggtttcaccatgttaaccaggatggtctcgatctcctgacctcgtgatccaccgcctcggcctcccaaagtgttgggattacaggcgtgagccaccgcacccagactaatatagcatttttaatgctatatattgcatttcttaacctatgatgaatcttagacaatggtctccattttttagtcttattgtctttctttttaaagtcaccagaaattaagtaaaggacgtataacatgctcagaaatgctatgaacaggtacccacaattgggtgggtctttgattttgtttgccttcctgtagtgttggaaccgtacttcaatgttctgggtaaaactagagccaggaaaatgaactatgcgcacatagttcattttgaaatgcaaaatgcaaaatgaaaatgtgcacatcaattaggaatgctttggctgaaagtgaaagacaatctggctaactgtggtttaacacatagggattatttttctacctattaaaaaagtgatataggcaactgctggcgttgattcagtgaccccataatttcaggtccagcatctctgcagttcttctgttctcttcctcccaatcacaaatgaccaagacatcaccaagtataaagattaaggcaccagaggcaggtaggaggaggcattgcaaggtacaagtgtcaacattttgcttttatcagaaaagcaaaagctttctccacaaaccaccaacagaccactgcccacatctcatggtctagaactgtgccacccctagctgcaaggaggctgggaaagtgaatatttagttttctcagcctttatagggaagttggcaagagataagaaaactggaaacagctattagtgaagccagctaagctttaatgcctaaaatattctccctgcaacgtccaaaatatctaccatgaaaatgaattctttggcattaaaaataacttttagaaggcatctatttacatatacatgtttcctggaaggatgatgtagcaacacactggtgcccattatcattttagcattaatttatttctgaagatttgctagtatttgcctagtacaaagccaagtgttaagagaataagataactaggcttcaacatagtaaaaatatgccaggaaaattccagacaccatcagtgaaccttattagtttcaataagcaggtgaaggcattacatttagcaagtaggcagggcaggaaacactaaaatacatttcacccactgcattatgtctaggatcagcctcaaagccagctcctgaagggcatagcagattgcatctaatatgtgccatcaaaactggcccactactccttttcagcctatccggaatcaagcaggcatgaaaaatggacatcatggagatgtgatgacagaaggcacatacctagatttctttcctcatagtacagtggttgttaagagcacagagtctagaactagctagattcttgggctccaaatcctggctctactagctctatgaccttatcaagttactgaccatcactgtgctttggttgcctcatcagtggaaaagatcatagggttgtgatgagaaaaacaagttaataaatgtaaataaatatgcatggtgcatagtaggtactatataagagctggctgcaaaaaataaggcctttctcctgtgatcccattagtattatgctttcatatttatatgtttttggtaaagtcttccttttcttctttttcttatataagaacaacatagtttcactacaaagaactcagaaaggacagggaagcaaaataaactttttcaagaaaaaaaaatccacaatccctttcctcaagggaaaaccactactaacatatcatatttcacccatctatgtatttttatttttgcaatagtgttctgtaacacatctttttaaaatttgacaatatattatggacatcttccacatctagaaatatatttctacagtgtctttttagttatcacaaagtattctgttaaatgagtatttcatactttaccttgccaattttctgctgttgaatattggcattatttctgtttttgtttggttgttttttgtttgtttgtttgtttttgttattacagatagcactgtgatgaacatctttagagctaatttctagtgcatgtccataatatttccataggataaattctcagaaataaaattgctaggtcaaaaatcatgcgtatttttaaggctttgatgagtgtgcttcaattgatctccagaaaaaaaaaatgcatccaagtatccattcatttccttacccctcttgaaaatactattatttctgtttcatttacagttttcctacaatccttactaagatccccaaacttgatggtgtctttgatatagcacccacaacacacaaatctgtgatttctatgtattatttaccctcagcccttggcccctgacctttcatcttagctgcatctcgaggacttcctctggtggactggatttttaccatgatgtattttatggtgggattgtcaacacatcagatggacgatgtgattgtcaacacataccctgactaatatctaagtcttctgacacacttttatgtgctgcttactcaattactcaacatttactcatcaccagctgaatttgtgaactacatgctagggaagcaaagatgaataataatagtctttgacctagaggatcttcagctaaagggaggcagataggtaaaaagataaatcacaatgcaatgggaaatatgcttttaaaacatttttatcccatgtcatgatagcagaaattgctatgcagttcattcatttatttccataatacataataggtccaagctctatactttcattttcaaaatttattatttttttataacaaagcaatacatgctcatttcagaaagatcagaaaatgtagacaaacaggaaaaaaacgctacttttaaactgtaatcccatctgtcttgtcaccattagcactttcatatattaagttgttttctacttttttaaaacaaaagttagatcaaaacacacatgttggctgggagcagtggctcatacctgtaatctcagcaatttgggaggctgaggcaggcagatcacttgaggtcaggagttcgaaaccagccagccaacatggtgaaaccccatctcaactaaaaatacaaaaattagctggatgtggtggtgcatgcctgtattccctgctacttgggaggctgagccaagagaatcatttgaattcgggaggtggaggttgcagtgagcctgggtgacagagcgagactccgtctcaaaaacaaacaaacaaaaaacatttctgtgatttgcttttttcacctaattatcataaacatatttcaagacaaaagatatatttctgcatcactttaaatggctccatattattccactatatggatatttacttatttttaacaatctgccattgttagacagttacatgtttatatctttttataattactaacaatactgcaattgattttgttgctaaatatttgtgctcattcttatttctttaccacaaattccaataagttaagtcatgtgatatttgaaatgcttttctcatagtcagatttagaggcaatggctgtaatagatatctcccagctcagttgctttttgtggctttgggtttcagtcctacctgctaaagattaaacttgatcaaaggtgcatgttctaagtgacattagcagtgtagtaatctaggaggtcatagcccttgtcctgccacaaaaaaaaaaaaaaaaaaaaaaaaaaaaaaaaaatttcataagctccatagacaaatatagccccaggaaagctctggagtacaattaagaagatgcagcaatctaaaagaactgagaacacccacatagaatacggtaggaagcgttttgcctgcattcacctcattccccagacaagcagagcccagtgaagaagaatttcttctgctgtgagtcccccagttgggaaaaaaagagagcaaaaggacttggcaggcttcaccatcgaggaccccagcagtcattgtgctaaggccctgcagtctttgccaagagtaaccccagctgccagagtcacccagagcccatcaagctacttcctcatgccagccacagataaaggtctttccctaccaaagacagtctgtaaagtttgaaagaggtgactgtttcttcaaatgcacagacaccaatagggtcatatcttaaagatattgtggtttgggtttcagaccactgcaataaagtaaatatgcagtaaagtgagtcacacaaatttgttggcttcccagtgcatataaaatatgttgatattatactgtagtctataaagtgtgcaacagcattatttccaaaaaacaatgtacatatcctaatttaaaaatacctcattgctaaaaaaaaggctaatgatcatctccttgatccacgggctgcaaaatagatgttgtgttagcaggcaaaaatcaactttaaggctgggcatagtggctcatgcctgtaatcccagaagtttgggaggccaacgtgggtggatcacctgaggtcgggagttcgagaccagcctgatcaacatggagaaaccccatctctagtaaaaatatgaaatgagtgaggcatggtggtgcatgactgtaatcccagctattcaggatgctgaggcaggagaatcacttgaacccaggaggcagaggttgcagtgagccgagattgcaccattgcactccagcctgggcaacaagagcaaaactccatctaaaaaaaaaaaaaaaaaaccaattttagttttcttatctatctccatcagagagagatcttgggtgactaagcacattgtcaatgagcagtaatattttgaaagaaatattttattgtgataagtaggtctcaacagtaggattaaaatattcagtaaaccatgctgtaaacagatgtactatcatccagttttgttgttccatttttagagcacaggcagtgtagagttagcataactcttaagggtcctggaattttcagaatggtaaatgaacactggcttcaccttaaagtcataagctgcattagcccctaatgagagagtcagcctgttctttgaagctttgaagccaggcattgacatctctctagctatgaaagtcctagattacatcatctgatagaagactgtttcatttacactgaaaatatgttgtttactgtagctaccttcatcagtgatcttaactagatattctggataacttgctacagcttctaaatcatcttttactgcttcaccttgcacatttatgttataaagatgacctatttccttaaacctcatgagccatcttctgctagcttccgacttttcttctgcagcttcctcacctctcgctgccttcacagaattgaggagtgttaagtcatggctctaggttatggcttggcctaagggaatattgtgcctggtttgatcttccatccagaccactaaaactttcttcatatcagcagaaagtttgtttcactttttttaaaatatcatttgtgtgttcactggagtattacttttaatttccctcaagaacttttctggacaaggcatggtgactcatgcctgtaatcccagcactttgggaggccaaggcaggcagatcacctgaggtcaggagtttgagaccagcctgaccaacatggtgaacaccatttctactaaaaatacaaaattagctgggcatggtggtacatgtctgtaaccccagctactcaggaggatgaggcaggagaattgcctgaccacaggaggcagaggttgcagtgagccaagattgtgccactgcactccagcctgggtgacagagcaagactccatcttaaaaaaaaaaaaaaaaaaaaaaagcttttcctttgcattcacagcttggctgtttggcaccacaggcctagcttttggcctgtcttgacttttaacatgctttcctcactaggcttaatcactactaggttttgatttaaattaagagacatgcaacttttctttcacttgaacatgtagagtccattgtaaggttattaactgacctaatttctatactgctgtgtctcagggaataggaagagagatgtctcaagggaagaaagagagatgagcgagtggctggttggtagagtgattggaacatacacaacattgccgtggctcatgcctgtaaccttccactttgggagtctgaggagggcagatcatctgaggtcagaagttcaagacaagcctggccaacatggcaaacccccgtctctactaaaatacaaaaattagtggggcatggtggtgcacacctgtagtcccagctactcaggaggctgaggcaggagaatcacatgctgaggatttctcagcagaaaccttgcaggccaggaaagagtgagatgttatatttaaagtactgagaaagaaaaaaaattgtcaaccaagaatattatacctagcaaaactatccttaaaaaagaaagaaagataaactttttttcagacaaacaaaaattgagacagtttgtcaccactagatctgtcttgtaagaaatgcttaagggagttatttaaattgaaatgaaaacatgataaacagcaacatgagagcatatgaaagcacatatctcactgtctatatattcagtaaaccatgctctaaacagatatactgtcatccaggatttattgttccatttatagagcacaggcagagagtggatttagcataactcttaagggccctaggattttcagaatggtaaatgagcattggcttccctttaaagtcatgagctgcattagcccctaacaagagagtcagcctgttgtttgaagccaggcattgacttcaggtaaatatatagacaaatacagaataatgtatcaatgtaatggcattgcataaattacttttaaccctaatatcaaagttaaaagacaaaaaatatttagaataaatataaccggggcaggtatggcagctcatgcttaaaatcccagcattttgggaggctgaggtgggtagatcagttgaggccaggagttcaagacaagcctggccaacttggtgaaaccccatctctactataactacaaaaattatctgggtatggtggcacacgtctgtaatcccagctactcaagtggctggggcacaagaatcacttgaacctgggaggcaaaggttgcagtgagccacgatcatgtcactgcactccagcctgggtgacagaacaagattctgtatcaaaaaaaaaaaaaggcacaactataaccacaaatacctgttaatggatacacaatataaaaagaaataaactctggctacaagaacaaaaatatgtatgtatgtggcaggggcaaaagtgtatagtttttgtatgtaattaaagttaaattgttacaaacataaaatatgcagatatagctacaagatattcgattccagctttgaggtaaacacaaagaaaaaaaataataggtgcacaaaagataaaaagaaaagaatccaagtaaatcactgccaaaacaaagaaaaaatcaccaaataacaaaagaagatagaaagtaaggaagagaacaaaataactgcaaaacaagcaaacagaaacaacaagatggcaatagtaagtcctcacttaccaatttactttaaatgtaaaaggactgcaagagactcactttagatttaaggacacacatgggctgaaagtgaaggaatgaaaaaatatattccatgcaaatggtaaccaaaagagaagagggttggttatacttatatcagacaaaatagactgatatagacagatagatagatagatagatgatagatagatagataaaactgtttctagagatagatgaggtcattatatgatgacaaaagcacagttaacagaaacatgtaataattataaatactgtacacactctacatcagagtacctaaatatatatgcacatattgacagacccaaaaggagaaattaacagcaatacaataatagtagaactttaatatccttctttcaataacagaacatccagattgaaaatcaataaagaaacttgaaaagaaaactaacttgaacaacacattagaccaaatggacctaacagacatatatacagaactatccaacagcagaataaacattcttctcaggtatacacaacgcattctccatgatagatcacatattagttacaaaacaagacttagcaaatttaagaagattgaaatcattccaggcattttttggaccacaatggaatgaaactagaaatcagcaacagaaagaaaatgggaacattcacaaatatgtggaaattaacaatacactcatgaacaaccgttgggtcaaagaggaaatcaaagttaatttttaaaatatctcaagacaaatgaaaatgaaaacacaacataccaaaacttatgagatgcagcaatagcagaacttacagggtggttaatagtgattaatatctatgttaatgaagaaaatcttgaataactcacctaactttaaactttgaggaactaaaaaaagagcaacactaagcctaaagttagcagaatgaaacaataaagattagagcagaaatgaatagagtagaaaaacaatagaaaaaatcaacacaactaagagtcgggtttttgaaaagataaaattgacaaacccttagttagactaacaaagaaaaagagaggggagagagagagagactcagataaacccagaaatgaaagaggagacatcacaaagggtgcctcagaaacaaaaaggattataaaagactattatgaacaattatatgccaacaaattggataacctagaagaaatcaataaattcttagtaatataccacctacaaaaaccgaaccaagaataaataggctgaacaaacaaataacaaataaggagattgaatcagtaataaaaaaatcttccaacaaagaaaagcctaggaccagatggcttcacagtgaattatatcaaacattcaaagaagaatggtgtatatgtgacacattttcttacatatacaccatggaatactatgcagccataaaaaatgatgagttcatgtcctttgcagggacatagatgaagctggaaaccatcattctcagcaaactaacacaggaacagaaaaccaaacaccgcatgttctcacttataagtgggagttgaacaatgagaacacatggacacagggaggggaacatcacacaccagggcctgttgggggtggggggctaggggagggatagcattaggagaaatacctaatgtagatgacgggttgatgggtgcagcaaacctccatggcacctgtatacctatgtaacaaaccttcacattctgcacatgtatctcagaacttaaagtaataaaaatataaaatataaaataaaatataaaatataaaatataaaataaaaatataaaaaaaataaaaatataaagtaataaaaaaataaaaaataaataaacaaaaaagaatgaatactaatccttcttaaagatgttaataataggggaaactgggtgtagggcctatgtagactctctggactacctccacaatttttttaagctaaaggtatcctaaaataaattgtttattatataaaagggcatgtaccatgggctgaagttccaagacttttacccctgcagcaggctgggggctatcacaggatgactattagctctaaaatgtaatgtcttcttctttttctttctttctttctttttttgagacagagtctccttctgtcacccaggctggaagtacagtggtgagatcttggctcactgcaacctccgcctcctgggttcaagaaattctcgtgcctcggtctcccgagtagctgggattacaggcgtgcaccaccacacctcctggctacattttgtattttagtcgagatgaggtttctccatgttggccaggctggtctcaaactcctggccctaagtgatcctacctgcctcagcctcccaaagtgctgggattacaggcatgagccaccgcacccggcctataatgtcttcttgaagcctgattggcaggctccctgggataagttgcagactaccttcccaggtgtttctttcttcctaatagttttctgatatcaacatttacatctcaattctctaagtacactcttggtagggttctacctggcgtgcactcagtgtggcttaccagacaccatgggggtgttccctgctgcaaatttgtacatgatcttggtggacttcaagctgactgtcatgtcagcatgttagccctgttcaaagaacagcttactctctgggggttttattccttttttttttttttttttttgagacggaattttgctcttgttgcccaggctggagtacaatggcaagatctcggctcaccacaacctccgcctcccaggttcaagcgattatcctgcctcagcctcctgagtagctgggattacaggcatgcaccaccacacccagttaactttgtatttttagtagagacggggtttctccatgttggtcaggctggtctggaactcccaacctcaggtgatccgcctgcctcagcctcccaaagtgctgggattacaggcgtgagcccccgcgccccgccatattcttattcaaagaaaatgagggcggacgcagtggctcaagcctgtaatctcagcactttgggaggccaaggagggtggatcacgaggtcaagagatcgagaccatcctggctaacacggtgaaaccccgtctctactaaaagaaaaaatacaaaaaaattagccgggcgtggtggcgggcgcctgtagtcccagctactcaggaggctaaggcaggagaatggcatgaacccaggaggcagagattgtagtgagccgagatcgcgccactacacgccaacctgggcgacagagtgagactccggctcaaaaaaaaaaaaaaagaaaagagaatgagaagcaagatgatgaagtggtagagtccttgaatgacaaacactaatgaaccagggcttctgcagcaggccctgtgctgggcatattggtacaatgctttcaacatggcttgcctaactcttctggtgtgcagcgtgcctggagaattgctagatttaacccaagaccccagttatcaacttttagaaaaaatcttggaatcagattacagaaaacgaaacaaaatggtgctcaaaattataccccaagaggccaggcgcagtgactcacgcctgtaatccttgcactttgggaggctgaggcggacagatcaactgaagtcaggagtttaagaccagcctggccaacatgatgaaactccatctctactaaaaatacaaaaattagccaggcgtggtgatgtatgcctgtaatcccagctacccaggaagctgaggaaagagaatcgctgaaacccaggaggtggaggctgcagtgagccgaggtcgcaccactgcactccagcctaggtgacagagcaaaactccgtttccaaaaaaaaaaaaaaaaatagacaacaacaacaaaaaattataccccaaaagtttcactacacccctttagtcaccagtttccaggctaagtctgaacaaggagcagttgttttcctctcttcaacaccttgaaaaagcaaatgacagcagagacagagttgcatcatcagtattatttcatcaactgcttctcaagaatttcagaaagcaggctataaccagactcatgggatgagtcacgtggcatttgctcttgtcattaagagtcagaatgtttgctaaaacagccatagcctgagtcatcactttacagaatgtcacacgaataatgcccaggaataaagaacattgattctctttctttcactccctggaaaatacagcctttatagtggggttataaggtacgtgagagagctacttcattaagttattttttattgtagattaaatgtttgaggttacttttacttattgctggcctaaataatgtcccacactgcaatcctgtcctttttctagctaactacctgatcgtgacttttccttgttttgaagagagaaagtcttctaaatgtcccaaattgtggtgttttgtgagtatttacacatcctttgccaagaatcttcataagcaaaatatgtgtggccctacaaagaaaatagagctttctatttttgatcaatgagtactgcataattcagttaaactcaactgagtttaatccaacaaatatttattatctattctaggtttaaagtgtactaagctctagtggggaaagagtgtttctgtcttcaagaaacacagaacagtaggaaagaaagacatacacccgtgaaacaaattattagctttacatgataaatgtcattctttcattcaacaaaaatattaaatattttccatgaatcagagcctgtgcggagtaggaaccagggatacaaaattaaatgaaatagcctctgctttcaaggtgcacacaatcaaatggagaaacacagacaagtaaacaatagttacattagactgtgatgagcgatgataacagcagaaatgggaccaaagagttggcagaggggtctgggaggcttacagaaaacttcagagaggaaatgacttctgagagttcccactaaaaggaaacagaggcaaagcatggtggctcatgcctgtaatcccagcacttcgagaagccatgaggggcagattacttgaggccaggagttcgagaccagccaggccaacatggcgaaaccccatctctactaaaaatacaaaaattagctgggagtggtgcctcacacttgtaatcccagctacttgggaggctgaggcacaagaatcacttgaacccaggaggcggagcttgcagtgagacgagatcgcaccactgcactccggcctgggcgacaaagccagactgtctctaaaataaagaaaaagaaaactgtgttccagcattcatctgttgaaataggatcacccctaatcccactaaacctcttcaatttcgacttgactccttactttgatttggaatgtttaaagaaaaggtcctggccgggcgcagtggctcacgcctgtaatcccagcactttgggaggctgaggcgagtggatcacctgaggtcaggagttcgagaccagcctgaccaacatggagaaacccatctctacaaaaaaaaaaaaaatacaaaaacttagccaggtgtggtggtgcatgtctgtaatcccagctcctcaggaggctgaggcaggagaatcacttgaacccaggaggcggaggttgcagtgagccaagattgtgccattgcactctagcctgggcaacaagagtgaaactctgtctcaaaaaaaaagaaaagaaaagaaaaggtcctaattggggctcaatttttaccctttgttactgaattaagacatatctccactatatttgtaggcttgattgtttttaaattaattatgcattgaaaagtctaaaaaagctactatcttttagttctttaagaaatctccacactgttttccacactggttgtactagtttacattcctaccagcagtgtaaaagtgttccctttacaccatatccatgccaacatctattttttttttattatggttattcttgcaggagtaagatggtatcacactgtggttttgatttgcatttccctgatcattagtgatgttgaagattttttcatgtttgttggtcatttgtatatcttcttttgaaaattgtcttttcatgtccttagcccactttttgatgggattgtttggcgttttattgctgatttgtttgagttccttgtagaaaggttctggatattagtcctttgttggaagtatagattgcaaagattttctcccattctgtgggctatttactctgctcattgtttctttggctgtgcagaagctttttagtttaagtcccatctatttatctttgtttttgttgcatttgcttttgggttcttggtgattaagtctttgcctaagccaatgcctataagggtttttccaatgttatcttctagagtttttatgatttcaggtcttagatttaagtccttgatccatcttgagatgatttttgtagaagatgagagatgagaatccagttttattcttctacatgtggcttgccaattatccctgcaccatttgttgaatagggtgtcctttcctccactttatgtttttgtttggtttgtcaaagatcagttggctgtaagtatttgggcttatttctgggttctctattctgttccattggtctatgtgcctattattaagccagtacaatgctgttttggtgactatggccttatagcatagtttgaagtcaagtaaagtgatgcctccagatttgttctttttgctttgtcttgctttggctatgcaggctcatttttagttccatatgaattttaggattgttttttctagttctgtgaaaaataatggtgatattttgatggaaattgcattgaatttgtaattgttttggcagtatggtcattttcataatattgattatatccatccatgagcgtgggatgtatttccatttgtttgtgttgtttattatttctttcagcagtgttttgtagttttccttgaagagttcttttgactccttggttaggtatattcctaagtattttattttatttttgcagttattataaaagggattgagttcttgatttgattattatcttggttgctcttggtatataccagagctactgatttgtgtaccttaattttgtaccctgaaactttgctgaattcattttcagttctaggagctttttggaggagtctttagggttttctaggtatacaatcatattatcagcagtgacagtttgacttcctctttactaaattggatgccctttatttctttctcctgtctgattgctctgtctagaacttccagtacaatgttgaatagaagtggtaagagtgggcattcttgtcttgttccagttctcaggaggaatgctttcaacttttccccattcagtataatgttggctgtacttaattatacatttagtataattaagatatgtcccttctgtgccaattttactgagggttttaatcataaagagatgctggattttgtcaaatgctttttctgcatctattgagatgatcaggtgatttttatttttaattctgtttatgtggtgtatcacatttattgacttgagtatgttaaaccatccctgcatccctggtatgaaacacacttgataatgatggactatcttttcaatatgctgttggattcagttagctagtattttgttaaggatttttgcatctatcttcatcagggatattggtctgtagttttctttttttgttatgtcctttcctgatttgggtattagggtgatactggcttgtatgatttagggaggattccctctttctctatttgtagaacagtgtcagtaggaatttgatccagcaatcccactactggctatctacccagaaaaaaaggagtcattatatgaaaaagatacttgcacacacatgtttatagcagcacaattcacaattgcaaaaatatgcaaccagccctaatgcccatcaatcaacacatggataaagaaattgtatagatacaccatgaaatactactcagccataaaaaggaacaaaataatggtatttgcagcaacctggatggaattggagaccattattctaagtgaagtaactcaggaatgggaaaccaaacattgtatgttctcactcataagtgggagctaagctatgaggacgcaaaggcataagaatgatataatggactctggggatttgggggaaaggaatggggggggtgagggatacaagacaacaaactgggcaccttgtatacttctcaggtgatgggtacaccaaaatctcagcaatcaccactaaagaagttactcatataagcaaacatcgcctgttccccaaaaacctatggaaataattctttttttttttttttttttttttttttttgagacagagtctcactctgttgcccaggctggagtgcagtggtgtgatctcggctcactgcaacctccacctcccaggttcaagtgattctgctgcctcagcctcctgaatagctgaaattacaggtacacgccaccatgcccagcaaatttttgtatttttagtagagacaggatttcaccatgttggccaggctggtctcgaactcctgacatcaggtaatccaccgaccttggcctcccaaagtgctgagattacaggcgtgagccacctcgcccggctggaaataatttttttaaaggctactatctgaactctgaagaccacttcctccagtcccatctgcaattcagccatccatccctgtgctgcagctgtctacaatcattcctaatattaagcacccttgcttaagggcagacagagacattttcagattttttaaagaatttatcattaggaatagttatgtggttccagatctatcctcttgggagattcaaaagttgtttgtttgtttgtttgtttgtttttactttaaatcctgctcatgagttttaaaaaatggcttcttaggtgcaagttcatagctaaatgattgagagtgccacctgccgggaacacctgaaattcctggacttgcatattgaattgcaagtttcctggacccaaagcatttgaatcaaactgagaccctctggttacaaatgaggactcagtctctacggctacagaatttgcattttaaaacagttttggggtgccttgaggtttaagaaacaaatgtcttagttcccaaacttgcctgataagaatcacccgggaatttttgtttgtttgagacagcgtctcattctgtcccaccccagagtgtagagacacaatcgtagctcactgcagccttcaattcctgggctcaagcgatcctcccacctgagcctcccaagtagctaggactaaaagcacccaacaccacgccctcctgatttttgtatttttcttttgtagagatggagtcttgctatattgacaagctggttttgaactcctgggctcaagtgatcctctggccttggcctcccaaagtgctgggattacagacatgagccactgtgcccagccagaatgcttgtttaaaatatttttactccggatcacattacagacttactgaattcgtatttccaagaaaggtgcctgggacttgagatttgtataaaaccatcagatgaatattaaaagctgaaatagattctctataccagggtagaagagcacaattgttgattttgttttttttttaagcagataattgataactagaatatgaaacatctaggtctgggaatatggcaacactaccacaatcaagttgtccctggattctctgtcccataattcagctctgtggtcttaagtgccagccccttccctaaaattcttgccattaaaccccaggctcccaggctgggcagggtggctcaagcctataatctcagcactttggaaaaccgggggggggtggggggggcgtggatcacctgaggtcaggagttcgagaccagcctggccaacatggtgaagccaggtcactattaaaatacaaagattagctgggcgtggtggcgggcgcttgtagtcgcagctaatcgggaggctgaagcaggagacttgcttgaacctgggaggtggaggttgcagtgagccaagatcacaccactgcactccaacctgagcgacagcaggagactccatcaaaacacacacacacacacacacacacacacacacacacacacaatcaaaaaaactcccaggctcccagtggcttcctctgataccagctaacacatttgtgatgccaactgcctgacaggcagagctcctgttggaaagccctcctacaacctatcttgtttgctttgtgaacggttttattaggttggtgcaaaagtaattgcggtttagccattactttcaatggcaaaagccacaattacttctgcacttaccccaattttttttttttttttttttttgagccggattctcctgctgttgcccagtctggagtgcagtggcgcgatctcggctcactgcaagctccgcctcccgggttcacgccattctcctgcttcagcctcccgagtagctgggactacaggcccccaccaccacgcctggctaattttttgtatttttagtagagacggagtttcacagtgttagcacttaccccgattttctcctgtgaagcaatgtcctaggtttggaactacctttgggatcgcattgtgtccaaaagaaccaaattccagctttgggcaatggtcagatactgaaactgaccagtcctaatatctatctggatttggtccaaggtcctgccctatcacaactacttgagcgaacacataagatgtgtcattgtcttcataagacacagaagatagtcattgtcttctcttcttcaagttaaataaaaagtcccagttactttaaaatagcctgtggtatttgaaaaaaaaaaaaaaaaaactctctgcacagttaagcccaggaccaggatagcatgggttacaagaaatacaaacagagccttaaatattgtaggtcatgagtatagtagagggagaaacagaatgcaaaatttcccaaagttaaccacaaaattcaattcttttttttcttttcttttttctttttttttttttttgtaggccatctcatgagactagccatcctgcggaacataccttggggaagtatttttttcttcttctttataaccattttggggctttgttttgaattgtctgtgtttttctttagtcgtgagattcagaacaaatacctgtgtcaggaatgggctaatctaggttgcacaggatggaggagactttacagtttccacaccattggtttctttttcaacaactgagtgttctgtttgatcaacttcaaagcagctctgctaaccataacactcctgtttaccacgtttctcagctttccttgcattccacagtatttccttccttatgtttgacccatttctcccccagatgtaccaacccgcatagtgagtcaaagaactgacaatggcttttggtcagtggttttccagtagctctgcaaagttttgggcttccactgagtttctcagaagctgcctgaaaattcatgaattggctctagacccttccacccacaaccccaaatcaagctttctgcttctttgtatttcatatcaaggcctgtgtaagactggaaaaagggatttctcaactcggcaatttgaaaacgactcatttaagttatcacctgttctcaggcatattatgttaagtgtccaaagaacaacccagatggttttcataataccgcgatgtagcaagcaatgcttttgaaatcatctctgtgctccctgcttagtgactctctaacccttgcaggaggagctatggaagccccacttcatcccagattctgagacaagcctggcacctgtcagcaaatagttaaggagttcccaaaccagtaagttaaggagtcccaaaccagtaagtgcctcagagattcaggacgtgattacgctgcctgctactcctgacctggctctgaaaaccttgtgtccaaacccccgcctggaaacccacagtcccaataactgagtccctgtcttgactctctgcaccatccttcagttcctacaggctcagcctttccttgccccctcccccaaggttttggaaattagagtcttctaccagccactctggtaggggcctgtttgctgaatgctatttaccacccgtgttcttatcagttgccagggctaggcactgtttgatgtctggttctgagccatttctggtttgatctgctctccaccctgaccttcccactcatctaagcagcttattgtctctgccaagcccagacttagattgtctttaaaaatccaaatttatggccaggtgcagtggcttacacctgtaatcccagccttttgggaggccgaggagggtggatcacctgaggtcgggagtttgagaccagcctgaccaacatggagaaaccctgtctctactaaaaatacaaaattagctgggcatggtggcgcatgcctgtaatcctagctactcgggaggcggaggcaggagaatcgcttgaacccgggaggcggaggttgcagtgagctgacatcatgccattgcactccagcttggacaacaagagtgaaactccatctcaaaaaaaaaaaaaaaaaagaaaaaaaaaacaaatttatatgtatctatgtaaatagaggggcctcctcttccctgagccttgaacagacagcagaccctggaccttgcatacataggagctggttctatgtccccaggacttgtctgcctttagctacccttagggacaaacctacctcctcaccatgtactctcccaccaattcaacatggactgtgatgtcttgacaatggaaggatgtcttactccttacacatgggctgagttcacatcccatttaagactttgtatatgccttttccaaatggttttctttgtccaaggccctaacatttatctcctttcctaacattgcgctgtggcgctgtgacctaacaatgggccactgtgttctgccatcattttggaaaaacttctctaacaaccatcattcttatttctcacctcttaggatcattggcctcattgagatcttcacgaaggctatagacccgtgctgtccactatggtagcactaactacttatagctattcaagtttaaaattaaattaaaggctgaggcaggaggatcacttgagctcaggagttcgagaccagcctgggcaacatggcaaaatcctgtcactatcaaaaatacaaggaattagctgggcgtggtggcgtgcacctgtggtcccagctactcaggaggctgaggtgggaggaccacttgagttaaggaggcagaggttgcagtaagccaagatcataccactgcactacagcctgagtgacagtgagaccccatctcaaaaataattaattaattaaaatttaagactcagttcttcagtcacaatagctagatttcaagttgcagccacaagtggttagtggcttctgtatttgatagcacagatatggaacctttttctttatctcagaaagttctatcagacagtcctgcctagaggcattgaccctctctccagaatatgcaaatatgtactcatattaaaaatgttgtaggcaattttaggtgattcaaagacactccccacttcctaagcccacctccccaaggtgttaggaacccctttctgatgtgggtgggggctgggcatagtggctcatgcctgtaattcccacactttgggaggctgaggcgggcagatcacttaaggtcagaagtttgagaccagcctggccagtatggtgaacccgtctctactaaaaacacaaaaattagccagaagtggtggcacatgcctgtagtccccactacttggtaggctgaggcaggagaatctcttgaacctgggaggtggaggtttcagtgagccgagatagcaccactgcacttcagcctgaatgacagagtgggactctgtctcaaaaataataataatatggatggggagcacatgactctcctaaagtctatggaggaggcaggtatcaggaaaatctcagttcagatgtcagtaatccttttcccttaacacacagtcttaagcacctgctggttccttgagagtttaaaaagaaacctagctgttcattacattgccccattcatcctgttagtttcattcattcacttattcaatatttattgagctcctactttacgctcatactgacctaggcaatgggatacaaaagtgaactcaatggagaagatcccttccctcatggagcttatattcttgtaggacagaaagacaaccaacaaacaagcaggtaatgctctctgctctataaacttagttttctccaattaatttcaaatctatttctgtaagcctgaacatgttaattctctgcttaaagacattccctcctgactaggagagttgattaaaaccacctgtgggagttaaagatctacatctgccaaatgcactgaaggtgatccacaaactaaattaaaatttggccactctccaaagtcaaggccataatctacctttctcatgagacagttctgtctgtaaatagttgggattataacaccctcactttcaaggtaaattccagggtattttatctcctaatttccagattgtttttgattgtgtaagcacatagaagacctcacaccaggtaaagtttctaaagtttacttcaagctacctctgttacatgatttttgcgtgggtaatccgagatctgcttcttaattgtcaactccacttggaattgttccaatgtttgccagtgttctgttatgttcttttctccttgtccagcttaatgacagctgtttttcttcaaaaacaatgtttcttcaaaaataatgtttgggtaaggcccgagttgggatgacattttctcttaatataatttgcattcttaaaatcaaacacattaccagcagattggcttaactgaacacatgcacgtatatataagaaaccatgtcctttctttccttgacccaaagttttgtatttcaccacactggccaactcccaaaagttgaactgaaatcaaagaattggttcattctaagatggctggatatatatatatatatatatatatatatatatatatatatatattcatctctatctatcttcctcctattctttttcccatatcacacaaaacacaaacacagacacattctgggtttacttggtactgccagtcctcaggctgactagaagactgaggaaaatttgaaagacaagagatctatctacagtctttcctaacttcctagtccctttaccagatttttccatgaggatttgtcttccttttttccttgaggaagccaactcttgagggctacaaaacacttatttcagcatgtgtctctaaaagataagaacatttgataaatataaccacactaccattaccacatcaaaaaaaaaaaaacagttattctttaagagcaaacatcgaggcagtgttcctaatggtttcataatgtcaaatgtttactggctttttaaaacaaattcaaaatacacataagttccacaccttgtaattggttattatgtctttcaagtctctttaaatgtgtaggtcttctctccatctctttctttccttgaaacttatttattaaagaaactcagttgtttgttcagaagcatttcccatggctgaattttgcataatatatcttcatgttgcaggtcaacattcacaggattctcagattcagttggaggcatgtttgattatctacactttaagtcatcaagtaatttgaatatattaatataaatcccataggctctttttcccactccagatgattcctccaataacctttcattcagtaagttccccgttgtaaatttccagttaagtaattctctttaggtttgatgggtgcgcacaacgaagaaaaggggggacagggaaacctttctgaaattcatttcctttgaatatatccattagagggcgacattgcctttaatattatatttccccaataaagttttaaattgcataaaatttacttttgtatttttgacaagttggacctcattgcctactttaatttctaatctcacgtctgtaaagtgtgactgcattctcctttgttagtttgatctctgctgacttgcgtctttggtattacagtacttccatctttgactctgttcccaattctaaccatcgggcggcgatgttgcataaataaagacccgcggaaaggcaaaattaagcgaaactgccaaataaaaagcagtttcaccgggggtaaaggccattaatttaagaaggaaagagacaaaccagacatttctagttcatatccaactcacggcccaaggtcagaactgtgtaaaatgcaacacaaaggagccattcaggagtgggggaggctgacttggggagagcgaatgcacaatccccgccttgagcctgcggttccactggagggggcacaggtccgtttgcgcacgtgcgtgtgagtagccacagggcagcggcgggacatgcctgcaccgggcatgggactgctgaaccaacagcgctctggcggaccgtttgggacacccgcccggaggcaggttggcactggcgctgcctggaggtcagccactcattgtaccccggaggaactgggtcccgcgggggcatacggctcgcccaccggcacgcgttaggaggcgaacacctgcatccagctaggtgttccgagctcagcccagggcgagggactgctctgccaccttcttctcattcttcctgtaagaacactgtctatctcggacaaaaaggacccacctgacagcaagtggtatcgtcacacagaggtaacagggaagtcacggatcctcttgagaatctgacaaaagttggtgccccttccccatagtggcactcagaaaactgcaggtgaaaccacaaatgggcggaggcactcacaggcttcctggggcccgtccattgatcagataccaggttaagaaattctgtccttattggagcctagacggcagcgcaaaggaaccagacggacttggaaagagaggcagggactccctcctccctccaaacacagccagcgtttcatctcggattgcgggaggggcctggcggaaggtggaggagaggtggagcgcctggatggggccctccccattctcctggccccaaccccaggacgcctggctgcggagggctcgaaagcgagcagcgaacgcccaaagcctgggtggcgggaaggtggcagcgccctgtagcttttcctttgcatttttctttaaatcgtgagctccggagctatcgtttcgaccgctgctttccggtctccacctccacctcccagttggctggctcgcccttcccccacccccccatcccccccatccccccccatccccacccccatcccagccgcgtgcccgaccctcggcctccagccccgcctccttcgccgcggggtttaacccgaggcagagtgaaatctgcatagtgaccgccccctcggagatcattggtgcagccccgcccatcgcggccggtgattggtaagccgcccggggttatttgcatgtcggacgcagccgggtacccagctgtgctgccggccggcgcagcgcagaagtttgcagagcgctttctcgccggctggtcccggactcgcgctgcgccctgcgccctgcgccgccgcctcctccttctgccgccgccgccctgttctcccgggattccttctctgtggaggactgactctctgcttgtgggaattagaggtggacaagggggagtgccggggggtagcgacggggttctttccagtggcagctgcgagtcgggacgccgggagcgtggggctcctgctggccacggatctcggccaccttcccgcggcctccgggcaggcaatgcggccgccgagccccgcgacgcagagaggaaggagggtggcccggagggcctagagcttgtttctgcccacttgggaaagagggcatggagttgtgagtgcccctcgctcggcgacgccgccctcggcaggctccccatggccgggacgtacagctcgactctgaagacgctggaggacttgaccttggactccgggtatggggccggggactcgtgccgctcgctcagcctctcgtcctccaagtccaactcgcaggcgctcaactcttcggcgcagcagcaccgcggggcggcctggtggtgctactccggctccatgaacagccgccacaacagctgggacacggtgaacacggtgctgcccgaggaccccgaagtggccgacctcttctcgcgctgtccgcggctccccgagctggaggagttcccctggaccgaaggagacgtggcccgggtgctccgcaaaggcgctggcggccggcggctgccccagttctccgccgaggcggtgaggcgcctggccgggctgctccgcagggcactgatccgcgtggcccgcgaggcgcagcgcctgagcgtgctgcacgccaagtgcacccgctttgaggtgcagagcgccgtgcgcctggtgcacagctgggcgctggccgagagctgcgcgctggcagccgtcaaggcgctgtccctgtacagcatgagcgccggcgacgggctgcgccggggcaagtccgcgcgctgcggcctcaccttctcagtgggtcgctttttccgctggatggtggacacccgaatctccgtgcgcatccacgagtacgcagccatctccctcaccgcctgcatggagaacctggtggaggagatccgggccagggtgatggccagccacagccctgatggcggaggggccggaggcggggaggtgtctgctgaggccctggagatggtcatcaacaacgacgccgagctctggggcgtcttgcagccctatgagcatctcatctgcggcaagaacgccaatggtaagcgcgcgggcctcggactggcagactgggtaggcaagaaatcccgccctgggctactgggggagtgaatttcctgagacaaagctggtggctgtgccagttctttgggagaaaacgtttggtctgaggatagggttcattacatggcacttgccagagattgttctaagggtgtctgacttttggagggtaaacttgtgaatgatctccatcctgttctgcgtggcattgttactatctgcgggctgttcattgattgggtgagattgaatctcttgaccaagccattcctgaacctctcttgaaatgaaacttactgccccgtggctctttaccgtgattgactaggtctctagctgctgtctttccccaacagctggttagattgactgattctgccccctagttttccccagctcaatagcagcaaccaaagggtcccaacttaaagacctgaaccttggataagtaagatgggcggagggaagtgggaagcccaagatctggtgctgcgccttgtgctttgctgggctgaaggatgctgtcaggcgctctcttgggggatggaggggtagtggttcgctcttacctatatgtgcccaggaatgatgaaacctggggaccccgactccccttcccagaaaagtaaccacagattgtctcctgagacctgatttttccaagctgtcaccaaccaagtgagccattggttaaaaccttgcattgtattaaatgttctttcctgaaaagagtggtggcccatcaaggggaagagataggtaaccgcatggggtcaagtctgggaaaggaaccattgggtggttgcacttccctgaagatagcatggatttggtgcaaaggatggaaacaaagcacatgaccttttccctgacaatgttagggggtgtgacattgcattcaactgcaaactacctacaagacttcagtttgagaagtcagcaccataaactgttcagaatggtattatggttaaacagccttacgatctgattggaaggccatttggggggcagctttcagtggcaaataagcaggcagtggaagaggtcaggtggggactggaaagggataaaagaagtcaaaacatggtttaacataatcataatagctgaaatgcaaaataacccttaatgtgtcgtcattattctcagcactttgtatttaactcaagtactcctagcaagcctattaggtaggtacttactgcatagtatgatgcccattttacagataaggaaaccaaggtacccagcagttaaataatctgcccaacattacatagatgttaaatggcaaaactggaatttgaatccagtttgaatccaggtaggcccctttaaggttctagatgctggtggagaagaaacagctttgtttttctggtttgttgttgttgtttgtttgtttgtttttcttactggactatagctctcagatcttatgctttgttttttgattagcccagttttcgagaacagttgacatgttaggcccattttgaagacactctgtaccaagcatggcttactttgacattattggttttgtttttaaattctggcactgccaaaggagatgctgggaattgaagagcatctgctgcttaattttcttcctcttaggtcagagctaaggtcagtcctgaatctcagttgatgatgtcacagctgcttgttgtgcctcaccctccaggtttgtggcatcaacactgggaacagcagctccagggcaggaagtggagggccaggggatttccatctccagtggtcataattgagggaaagagttctgtacttttggctgagaggaggcccaaactgaactcaaagaagtaaaggcaggctcctaggagaaaagactgaagacctaaccctataagccaaacaagaataagggtggaactgtaaatgcaaaacaaaacaaaaacatatattcatgcagaacaggtgcccagcacattgagaagcttctcccagcttttctaactgcaaattgaaataaggaagaccaactccctgcccaggacaccctgaagatgcgaagtggccagaagctgctagaaaacagatgtcttctgctaaagggcttccaaccaaagaactatttcttatctagggtcagcattccttgggatttcctttataagttggtcttttggcaccacctacccccccacccccaccccccagctccaccaccaccttttgtttttttaaatagagacagggttttgctatgttgcccaggctggtttcaaactcctgggctccagcagtcctcctgcctcggcctctcaaaatgttgggattacaggcgacaggcgtgagccaccacactcagccacgaccccatgttttaacctcctccttgccccccctttccaaacaatcctccttaatcctgggtagtcaagagagcaggattctctgtggcagacaacaaagctccccggatgctcagagtcaaagtgtctccctctgtaccttctcgggtctccagggaactctcttgcaggcgaggtgaccattcacttccacttagcaactggatgctcattttttatacatgaaaaccagggggtggccacattaaacaataaccaggctgatttattaagtccctttagacaaagtgaaatgaatgtttagtagaggggcaatgaattacttatgtctgaaagctggcttcagagggaagcatacactgcttaggaacaaaatggagtggtccaaacctttgttatattaaaattaccccaaggccagcaaggtaacggtttacacagctgaagaccaactggggaatgactgcgtatgggaaggagagtgctggttagaattcttgtcctgctggtcttccctttaaattataaatttattgttgatatgcctgctaattatacagcatgggcacatgcatttgactcagctatatagggcttttaaacttaatgtcttccaaccaagaatttaagggccgtaatccatctattcctgtccattactcagaatgcaggacaaatatggttttgctcagcacaagatggataataaaagttctgcagtgtttacaaaacatgatcccagctccgtagagcagcaggagttatatattgttgctcatttggtattgatgtccccaatcccatggcaaggccattaaatgatgatatcttcatgacttccttacgggaggtagagaaaccaatttaatagagcagtatttataaacaggtagtttgcacaaaatagaaacttttcgcatccactcatatccctccctactctcctctctcctctctctccctcctctcccccatcacttcccataggtgagtttgatgctgagcatcactactaggtttcttcttggtcattcttcttactaagcttttgtgagtgtctgtggcattttagaaaatcttcctcaatttctagattcttgattaagtgataggatattggtgagaatattcttgctccaaagaagtatccagggtgtacaaaaggattgctctatcctagtggtaacatgcacaagactttggattcaccatgagagtttgaagcctacctttgccatttattttgttttattttgttatttgtttattttgagacagagtcttgctgtatcacccaggctggagtgcagtggtaaaatcgtagttcactgcaaccttgaactcctgggttctaagggttcctcctgcctcagcctcccaagtggctgggactgcaggcatatgccaccacacccagctaatttttaaaattttatttttgtagagacagggtcttgctatgttgcccaggctggccttaaactcctgggctcaagggattctcccgcttcagcctcccagagtgctgggattacaggcatgacccatcatgcctggccatacacaactttgccatttacatgagtggcctggtgcaattttcttaaccattctaaccttcaattttgtcatctgcaaaatgggacatagtaagagcacctagcttatatgggtggtatgagaattaaatgagactatagattgaaagatcttagcacatagtaaatgctcaataaatagtaaattcattcaacaattattgagcactgaccctgtacccaccactgttaaaagtgctgtggactaagtgatgaacaaggggaaaagccctcctctcatgaagtttataatccagtggaggaaatgagaaaaagtaaataagcaaggattttctcttggtaatgagtgttgtttaaaatattttttttaaagggcagggtaatgggatggtgtgacggggctaatttaaatgacagtcaaggaatgcttctctgaaggtttattagtaatagccagtaatatcaatactactaaggacctttaggccaaaaatagtgactgaggacttttctgaatgattcagttattcaccagctgagagaagtctcaacatctcacttagagctgagaaagaaaagggctgcatgtagagcagggacgaaacctcttctggttgtgggatttatttagtgatgagattgtaggatgaatttctactgagagaagcaactgaagcagcaagggttgattgagcttgtcaggtggtgtttaatcagtttccacacctgggtagtctgaaggatgagggctgcttcctatctctttaaccattttattaaagccaagagagttggtaaaactgaaacagagcaagctttggaaatgaaaaatttttttttctcgcacgcctgagaaaggcaaccctagccttaagtagtaagaggaacaaggtagagttgttccacttcctcctactgaaagctctacctgactcccccagctggaagagccacccctttgtgatgtttcctcagcacccaggacatattcttaaatcatttcctgcttgtgtgtgtctctcccataaaactgtgcacttcataggcattgctgtcttccctgtacctctcatggtgtctacaatatgtgctctataaatgatgggcaaatgatagatcccgccatacaggtttaaaatttgtatttgaattcctttgatatatcagaaccgtccccatttctaccaaggcagaaaatttccaagttgttctcaatgaatagagtcagcattttggggctacatccaacctttgggtaccctgctttctagcagggttcccaagtctggctttgatgtgcaagatgtgagttgggggaattttcagtttaggagaatgtcttcagtgtacaatacccaagaggaagggcttcacaacagacgtctggtacagcaggccacagaaaagtcaacaggaggattgagttgaaggtttccttaagaatggaaataccaaccgcccccttgccaacagagctgccccagaggacaatttatgttgatgactattgctcagaagagtttacatctgtgtcccactccatctgcctccagtctgaggactgaaccaaggtaatcaattgccaagacattcctgggttggcatcccaagaatgggaagttctgaaacaaaccagagacacttggttgcacatcctcagctttgtccttatcccacctcaccatcagtattcatcctttgtccgacaggtcagtgggtagatgcttcgcctctatttctactcttatgcagctgtagtaataggtctgacttttccacaacacctcaagcttattctcatctgtgagctttctaggtccccatgagaatcctgtgaatgtgtgtcctttcactgagaggtctccatgagtccagaattcacagctcaataataactaagctcaataatgactaagtcccattttgctcaagccccaggcctgtgcttttcctataaagaattacagaatccaaggtagcaaatacaggtcagtacttggccccattcagatggcagctagggtcaaactcatagcaagaacaacacttgttataggtcttgtttgttaatggcctatggtgtccagacactttacatttgttaggccagtgagtgttcacgaccacagtgaaagagcaggcactgacacccaggggtgtatcttcctccaaaggttgctgttactctgtttaaatgctgcttgctggctctccccaccctagaggtgccactgattttaaagagccattattgctgctcctggggatggaagaagagggcacagagagctctgctgcccagggagggcctttataagtgtcacctgctggtgaccaataagctcagctgaatagagaagccgcagagtacactgcgatgctcttctaaaggatgggcgggtcagctcagcaaaggctaatacatgaaggagagaaggcaccaagagggatttgagtctaggtcactggtcttggggagcttggtgcacctgtcctggagttggcagaagagcctgtatgaagggggctttgatttcctccgagtcccccatggtgtccggctgctgactccatctcggtgtttagagcacagggagagaatgagtcagcgatgtagcaaagcagtgaagggcccagactttggagtctgaattgagtcccagattgatttgcctcttactgacctaggccttcaagcaagtcacactatgtttctatttcctctactgtaaaatgagaggcttgtacacatgcggttgtgccttatgcatactcagtgccctgggatgtgagagatgcagccaggcttactggtgagagcacagcacggggtggggctgcctggctgtaattcctcataacttcacttgggagctgtgtgaccctgggcaagttgtttcacttccgtgccttagtttcttccttgatcacagggcaccattgacattttggactggttaatgttttgtcatgaggttgtcttgggcattgtaggatgcttcatagccaccaccagttgagaccatcaaaaatgtctccagacttttccagatgttccctggggagcaaattcacccttggctgtgaaacacagctctataagataggactgaaaatagtacccaactcataggatggttgtgagaatttcataagagtccctgtgagggactttgtgttatgcctgacacataagatattctaattgtttttaacaaacttgtgttggatccactgattgtgttcatttttgccaaagtctctggtgcaaggagggtcacgacccaaatctcagggagatgggtattactcgcaaggctttccttggtggctaacagtttgtttgtggaggtaggaggaagttatggaatctggaaaagcacccttgcaccttgctcagttatggctcgattacccccaacaacaagtggtctggcagtgggcagagagattagatctcaccctctgagctcaagcccatctctgccaggatgacagcaagagtgcacattcaaagctccaggcccccagagagcaattctcctgtggatattggaccctgcttgtggcagccgccaaatcctcagccacagatcatagcaggtgttttgtgttttgctggcctgtcatgtaaacacactttgtggtcttcctgcttgttttaaaaaaggcctaagtgcttttgcagctttggttgtgtgcttggagctgcatgcaggattgggaggagatacataaggaacacagcccaagtactcctgaggaatgccatgccggcatcattaatcaactgctcactgagtgccagctacatccaaggcaatggagacagattagcaagggacaagaatcttgactgttttgagtttagaagtgtttagaatctagtagggaaagcaaagcatatatacagatagttacaaagaagtttatagtgaccaccttcaaacaaagaggggagcaatggcgatagactccactgtctagtcttcattgctggttccccattgcgggtgcttttcaggagctgtttcatttaatcctcccagctcctctggaaggtagatataacttccatcccatagttggggaccttaaagcttctggtgattagaaagcttaaagggaagagatgactcctggctgtctgggtggaaggaagtcagggtttctttgtggaggatgtggcaggtgtgccagtgatttgggcaggtagagctgcgactgcggagatgggaggggatgcagagcccccagaggcttccaggcagagggaacagtgtgagcaaagacctggaagccaacgcatatgtgttggagaacagcaagttctcctgtttgggtggaaggttcagatacatgacaagcaggaacagtggagataacacaggaaaaaggaaagctttcccacatcttttatccagatgttaagaagcctgccagagtacaggatgagagttttccaaaacttattttcataattcagaaattgagtgtgtcttctccctagctcatcttaaccatggccccagacctccaattactcctcttggtgattgaaagcttgacctcaaaaatgcacccgtctgctgtcctagcagtaaaagcattaaaagaagaccttaactgagcaaacttgggttgtgaggggttgaagaacaaggcttctatcaacccttcttttcttgttgaatttggctctgactttgcatttcttccgtggccctgaatgtagcattacaggccaaagcaatcccagtacagaatgaaggtcaagactggcaaatgtgttaaacgaggccattggatcgactcttgccaaagcaggattcttaatcgtggagcataaaacagggtgagagaagatggtcccagaacttttttttttcggtgttaagtccgactgatgtatacgatattcgacttccagtttagggtttattattttggacaataaaagctcaattctcagagatgctgacattttaattcttagttaatgtgtttccagagcattgataataaagatttcaagcatattaaatgcttaatattgtggaaccaccttatagctaattgtcttctgaattggagtccctaaggtgcagctgaattctgctgataataataaaatgtgataggtcatcaatggcttagctaataactcaggtgtcggtctttttccggactccagtgttatgaagggaaggaattttcttgtcacttgacaaagataaacttcatgaacatattgcaaaaatacatacacagtcatttgtagttagtgacttgaggcccacagtttcctttctttctttatttttattattatttttttgacacaaagtctcactctgtcacccaggttggagtgcagtgctgcgatctcagctcactgcagcctcctccttccaggttcaagcaattcttctgcctcagcctctcagttagctgagattataggcaggcaccaccacacctggctaattttcatatttttagtagagacagggtttcaccatgttggccaggctggtctcgaactcctgacctcaagcgatctgcccgccgtggcctcccaaagtgctgggattacaggcatgagccaccatgcccggcccatggtttgctttctaaaagtaagctgaggagagtcaggcccatgatggaaaaattaaacaagaaaactaaacttggaagcctggacatacaaggttagagttgaggagacattaaactggacctcaaagaggttgaaatgggcctctcagtgcacgaaaaccctccctacagttgaggccaagcttttattgaaacctttacaactttttttagtctgtacattttaaaatatgaaaattagtatttgctgtgaggagagctattaataaacacaagcctgaggctcacacaccaagtgggtgtacgtgcacaagcatccggaacaatccagtacagagctatgaggatttggatccagaaaattctggggtggagcttgccccgtctgtgacctggcatgaatcattccatctcttggatctctgtttccttatctgtggtgtggagaggtcagactagattccccaagggcttttctgtctctgatagtgtttctagaccccacatggacactgtgcagtcattttcctaaggtcgagcgctgtaattagtatccttgggaaagaaacacccaggatggtgctggacgagctctttgaagacctggcttggtaatagggctggacactgtctttttaatattaagattaattgtgattactgtactcagggttttcctgtgcccctttccccagaaagatgagtgctacatgcttttggccgacctcatgcttcagtgcttgacagctgcatccaggtcctggcaggccggcactgtggtgagatccagctccgaggtgacttcatatagcatgtgcttgaagcccgcctacccagacttggatatttatagcaggggagcagctagaaaaaaaaaattaaatatgctacacccttctttatacgatgtgggacagagacaggcattgtgaggaatttcaaaggcagagctgtataatccagcaggatatttttaaatgctgtttgttgccattggcagggccggtgtttcaaagaggagggaaaatgagagtaactgaggatgacaggctgccaggaatgctgaaggccgagacatggagctccatgctccgaggtatacaggctctgaaccctgatgtacttcacagtcacatagcttgaatagggcttgggcaggtcagtatgagaggctggggaaatggggtggcttgcctgtttctcttccccaaccggcccatctacccgtcaaatcccaagttgaaaattgatgaaatcttctggagaggcagaacatatggcaaaaaaagagttgcttttgtgaaagccagggacctggttgtttcttcttcagcccatctcagcagccgggtaattaaagttgtacatggggacacaatttggaagcaagttgcttgcagctgttcttctggacttaatccacttgagtaccagctgggcaggccaggactatgctgggacccaattcagtagcaggtgagaaggcctcaggggtagggctgcctctgagaaggcatcgcaatgtcccccacctgtccagtgggtgcttgtaaagtattctaagtagtgttttctaccacactggtctttgaggagacaaatgatgatggcgggggtggggagtctgaggactgtgtaggggagaggccaggagttctgtttgggttacatccgtttgttcacccaacaaatatttattgaggactgtgtgctgggcactgttccaggagctggtgatgcaacaaatgaataaaaggggcctgaaggagggcagggtgcaggccctgtggataatgaggcagagtgaggggaatcacctgaggccagcctggctggagaagacagctctaggcagagggaatagcaagcattcctggtgggttcaaggagccaccaaggagaagctccttccgtgcggctggggcgagtgtagcaggagatgtggttggagaggaaatggtggggtggttagtggggtaggccattgggtaataattcattggcttttagttctgagtaagctgaaaagcattggagggactcaagcacagagtgacttgatctgatttgtatttccacaaggtcactctctctattgtgttggaaattgactttagtatcaagtgtggacgcagcgggaccagccactggcacttgccaacagcttggatgtgtgaggtatgagagaggaatcaaggatgacaccaagttgctatggtctgagccctggaaggagggagtggccattgactgaagtggggaaagctgtgtatggaagaagcaggactgcaccaaagatcctagtgcggttttagttgtctgtctcaaatcacatacagatatcaaataggttgggccgggcacagtgactcacacctgtaatcctagcaccttaggaggctgaggcaggtggatggcttgagtccaggagttcgagatcagaccgggcaacacggtgaaaccccgtttctacaaaaaaatacaaaaactagccaggtataatggtgcacatctgtggccccagctacttgggaggctgaggtgagaggattgcttgagcccaggaggcagaggttgcagtaagccggtatcacaccactgcatgcactccagcctgggcaacagagtgagaccctgtctccgaaaaacaaataggaagttggctgggagacaggccaccttgaacttcattagtcatatgatggattgaaatattgcccttctttgcccttccagagggtgggctcagtatagcagggctgcatagagactcagacaatagagatttaattttcagtcttacgatctttggctgatggccataaaagcccctgaattttgctttccagcttctttgtaggcagccagcagcctttaataaagatcatcaactctgttgtttcctgtcattaaaatgggggctgtttaattagtccaattgttctgtggatcattgtgactttgcgtctgtgtccttcaattctgggaaagcaagactccatttttcaggcagctttggattcctggaggtcaagtgtgggtctgaaatttggccggaaaaagaacgctcttaggtggcttgagaaggcatggggcctggagtggtgtccgaatggtttgggagtatccaaccgcctgttggatgctttgacctcggctgctcaggaggggcagggtgcaaagcctggctaagagatggggtctgaaggagttgtcactgtctgattgccagctagatagctgaggtctctgccctcagttttcctcttctgttaaatggggttgccatagttcctagctgatagggttgttgtttcagtggttttcaatcctagattcacgttagtattatctggatagcttaaaaataaaagtgtcagccaggcatggtggctcaagcctgtaatcccaacgctttgggaggccaaggcaggcagatcacctgaggccaggagttcgagaccagcctggccaacttggtgaaaccctgtctctactaaaaatacagaaatgaggcggtgtggtggcaggcgcctgtaatcccagctactcgggagactgagacaggagaactacctgaccctgggaggcagaggttgcagtgagcgcagatcacaccaccacactccagcctgagcaacagagcgagactctgtctcaaaagaaaaaaagtgtgtgtatgtgtgtgtgtgtctgtctgtctgtcttaaggccctacctccagatattctgaaataaatggtctggcatggggcccagaccatgtgggtagcattcctgggagagcctggtatgtagtgaggatgcagacattaactattattagtggtaaaagcatccttgttctggagtatgtcttttcgccccacctaggatggtgactttccttcatttcacagccacagcagctttggctaactcatctagagggatcaccaaagaacactcaagagaagcttgaactgttaggtttacatggaaagggcatggctagatctaaaatgggagcaacatattagcccagagtgctggcgcacacctgtaatcccagctactcgggaggctgaggcagcaggattgcttgaactcaggatgcggaggttgcagtgagccaagatcgcaccactgccctccagcctgggtgacagagtgagactccatctcaaaaaatgaatgaatgaatgaacgaataaataaataaataaataaataaataaataaataaataaatgaaatgggagtgacaccataagatgttatttgccccactggtaaatgaagtgaatactgtgattcccatctttaagatgaagaaacaaagtcacagagaggtttggtagcttgctcacggtcatgcaggtaataagtggtggtccaggcagtcttacccctgattctctactcttcaaccatgtgtgttccctccccagccagagaagccaagagactgaattctcaactctgatacccagcacagacctaccgtgggtcaaacttttacgaagcaccagaccccggcccatgtgcttcacatgtattatatcatgtgattcttaccatcatatatactcttactcccattttgctgctgaaaaacaagctcagagaagttcaggtgacatagctagtcaatgacacagccgggctctttgagctctgaagtcctcatttgccctgtggcctcctgtcctcaggagtggcctgggtggggacgaagcacatgcagtgatttcctgagcaaagaaatgaatgggttggcccaagaggacaagaggaactgaagcaaggccaaagcatccctcactgcatctcaacaactgagccactgggggcctgaaaatagtaacattgcccagtagggtggccagccagctgcgcctgagaactgtggggtaggtatttgtttctctgcgtgtttaaagataataccgtatgaagcacattgtttctcttctgttagtgtgaatgaaattgcctctgaaaggttgtgtgtattggttgcttaaaatagctcaagaggaagaatgtttggaagctgttagctccttgagtctatttccttgatttatgataccttggagagtgtgggacctcttcttgtttacccttctggctttttctttctaccgtgtttgagtccttgtgtcatcataagccaaaggcatttgtcaccagaaaatgtggcaacctttcctaagtaatttaatgggggaccctttacacgtttaatctttttccttaaagggaggaaaatggggagaggtcatttgttttggaaatggccatttctctcttccagctgaaaacgttccaagatcagagcaatggcatttgcttgggagtaagaaaaatttgttttatttttccgttcacactgaggcctggcctgggaactcatgagtttttgtagaacttccatcttgtggtgcccaggagacctgacaagctgtgagtgagaggagccacagagctgctctgttcaatacggcagccacttgccacaggtgtatatttaaatgtattcaaattcgataaggttaaaaaaaaccatttcctcagtcatgcaagtcacatttcttgtgctccctcgtcatatgtggctagtggctaccatattggacaatgcagatatagaacatttccatcatcgcagacagttctgtgcaacaatacagccattagagtgggtcagtggtgggtcgcttggggccagctttctgggttttcacaggtctaaaaatttcaaccattccccagcttctcagaagccctctgtttgcagaaacaagaagattcatggaaatggagattaaggccattggttcttgtggctctaacctctggacccttgacacaaggtcgggttttatcatttccaagctgcgtggcctcaggcaagtcacttagcccctctcaagttgtttcctcctcagcaaaatggtgttttaaaaaatacctcccagggatgatgtgactatttaaacaaaataacaaaatgtatataaaacagttagcataaggcttggcacacagtaagaacttagatgtgttacaatgttttacctgcattttcttctttgagccacacagtatcccgcagaggtagatactgttgctgatttcaagatgatggaaggggctttagggagtgctattgctaccatcactgccactgttcctactgttgatattcctaggcttgggttctgctttttcctctaaggctcatctttcctactgagcttgttgactggcttcttgtcataaatcagaggatgtttgtttgtttgaactaggaggtcttctgagctttcattcagggactgtttcttccaccatgggaggtgagctctttcagaggtgtttgcctaaagctggcctattggtatctacctggagagccgccacctggacagctactgccaggatctggggctccttggaacttgaggttaaagtttttagtgcttcacatgacctgtggtcctttggctgagtctaacagaggcttcactgagatcttagctgagggtggctttgggaggagtatctctgagaagagtaggaccaaaagagtcctctcttgagctgtagaaaggatccttctgaaaagatatttggtcacacctgggtcctgggttggttcgcaccttgactcccccagtcacttggctagatcatatagctaattatttaactttgcaatacctcaatcttctcatctgcgaaatggcgattatactaaaactacctggcaggctggttgtgcgaattaaatgggatgatgctaagtaaagcatttagcccagcacatggcaggtagcagccaccaggtatgagctactgttgccatcttcattattgttgcttcccagcaatggcatttggtgcactattttttcacgtattgttcgcattttctccttgagaatgtcttatctgtctagtcagaaaaagcgacccagaaggggtttagtgtgtaaagtgagtgtctaagttaaacttgcatattatggactctgtgtggtcttttattcttccttcttcccttcccttccttcctgtccttttttctttttttgtttttgtttgtttgtttgtttgtttggaggatggtggggctaagaagcatactgtgcagttatcataaagcatgactgtgcagttgtcattctggtaccccacatggtgaccagcctgcctccttcctgctggttccagctgtataacaagctaacaagcaccacccagtcaaacagtgtaatcagagctggattatttctataggattaatttgtggtgtgaagtgctcatgtatttatgcaattgccactcgtttgccaacatccagaatgtgctaaatctgccactagtgatgaaatccaaataacttggaatcatatgtagggaatccagtaattttcatcaccattgttacaagagaggagtttaaactgggggaatccaaatggcaccgagaaatgatgatatccctgctttccagggatgattctactcagggaagcaccaatctcaaagagaaaacaggaaggacacaaggccaggatattgcatgattgtgttgccattggtgtaactgggtcctcactgagggccctcccaggcgaccacaccatcgtcttttgtgaggcttctctggcactgacagatcactcatagttaatgggtaactcagactcttcttgccaaatagttgctttgtttgttatctgtgctgtggtcgccttcattgtccccacagcccctcaggcctcagaaggatgtggtgtggagtggggtgtggtgacctctagcatgagcccacacacttcttcccctttcccttaagtcactcattgccggagctggctggttgcagaaacatcttgaagcactttaaaaattgatgttctagactgggtgcaggttctcacacctgtaatcctagcactttgggaggcctaggtgggaggatc

SEQ ID NO: 150 - DNA, 3899 bp, Homo sapiens
ctgacgcgcggctgcggggcggagagctgcggctggcccagcgcgcccacctgaggaggcggcggggtccgcaggcgtcgcgggacgaggagatcggagccgggagactcgcgcagcgccatggcccccattggcctcaaagctgttgtcggagagaagattatgcatgatgtgataaagaaggtcaagaagaagggggaatggaaggtgctggtggtggatcagttaagcatgaggatgctgtcctcctgctgcaagatgacagacatcatgaccgagggcataacgattgtggaagatatcaataagcgcagagagccgctccccagcctggaggctgtgtatctcatcactccatccgagaagtccgtccactctctcatcagtgactttaaggacccgccgactgctaaataccgggctgcacacgtcttcttcactgactcttgtccagatgccctgtttaatgaactggtaaaatcccgagcagccaaagtcatcaaaactctgacggaaatcaatattgcatttctcccgtatgaatcccaggtctattccttggactctgctgactctttccaaagcttctacagtccccacaaggctcagatgaagaatcctatactggagcgcctggcagagcagatcgcgaccctttgtgccaccctgaaggagtacccggctgtgcggtatcggggggaatacaaggacaatgccctgctggctcagctaatccaggacaagctcgatgcctataaagctgatgatccaacaatgggggagggcccagacaaggcacgctcccagctcctgatcctggatcgaggctttgaccccagctcccctgtgctccatgaattgacttttcaggctatgagttatgatctgctgcctatcgaaaatgatgtatacaagtatgagaccagcggcatcggggaggcacgggtgaaggaggtgctcctggacgaggacgacgacctgtggatagcactgcgccacaagcacatcgcagaggtgtcccaggaagtcacccggtctctgaaagatttttcttctagcaagagaatgaatactggagagaagaccaccatgcgggacctgtcccagatgctgaagaagatgcctcagtaccagaaagagctcagcaagtactccacccacctgcaccttgctgaggactgtatgaagcattaccaaggcaccgtagacaaactctgccgagtggagcaggacctggccatgggcacagatgctgagggagagaagatcaaggaccctatgcgagccatcgtccccattctgctggatgccaatgtcagcacttatgacaaaatccgcatcatccttctctacatctttttgaagaatggcatcacggaggaaaacctgaacaaactgatccagcacgcccagatacccccggaggatagtgagatcatcaccaacatggctcacctcggcgtgcccatcgtcaccgattccacgctgcgtcgccggagcaagccggagcggaaggaacgcatcagcgagcagacctaccagctctcacggtggactccgattatcaaggacatcatggaggacactattgaggacaaacttgacaccaaacactacccttatatctctacccgttcctctgcctccttcagcaccaccgccgtcagcgcccgctatgggcactggcataagaacaaggccccaggcgagtaccgcagtggcccccgcctcatcattttcatccttgggggtgtgagcctgaatgagatgcgctgcgcctacgaggtgacccaggccaacggaaagtgggaggtgctgataggttctactcacattcttactcccaccaaatttctcatggacctgagacaccccgacttcagggagtcctctagggtatcttttgaggatcaggctccaacaatggagtgagagccaaagaaacaaagatccacacacatcctcaccccacagaaactgctggacacactgaagaaactgaataaaacagatgaagaaataagcagttaaaaaaataagtcgcccctccaaaacacgcccccatcccacagcgctccgcagcttcccaccaccgcccgcctcagttcctttgcgtctgttgcctccccagccctgcacgccctggctggcactgttgccgctgcattctcgtgttcagtgatgccctcttcttgtttgaaacaaaagaaaataatgcattgtgttttttaaaaagagtatcttatacatgtatcctaaaaagagaagctcatgtgcaattggtgcacagcaggagaaatttctggactgttaggatgaatggacgccttctccccgttatttaagatttgtgaccttgtacataaccctgggtgacgtgcacattgcttgggtatggaacggtagaaatttgggtgtttttaaaaccttgtttggggttgttcctgtccttgttgagaatcatagagatgtctgtgttcttggagtatttcacactgaggactaatctgctatcttcattccagtccctacccctcagtgcctgctctcatccaaataacctgggaggtgacaatcaggatatctcaggaggtccaaggtggaacagacctctttgcctttcccagcgtctcatacccccggtagtgcagctgtgggtggaggctggggtgtctgcacgaagtcaggccagcgtcctcctccacagcctgtcactgccccctccccagcctgtgtccacagtgctgtgatcccgagggaagtcctccagtctaagtcacagtgccctgacaggtgagaagcaaactcccgctggaagcctccatctctttggaaaaacagttagtctggagcctgtggcccaggcccttctgtccccaggcatcatcccaacagctcattttccctagtccgccttcgttcaagggtcaggaatggaccagaacagatgggttctggaggcccctgaacagagggctatggctgtggagaaggttcttggcccgttggactcacacagaccctgtaccctctcggcaagcatcttcagtcagattatcctcagtttcagatacttcataataccttgtgttgtgtggggtcatacatcatcgtgtttgtaagagaagatggtcattttattctctgtataaaacttagctctaaagcagaaactaaagcagcaaatgcaggaaggctgtctcgccatcctcaagactcagcagctctcattctccagtggtgagcacaccatttgtgctgctgctgttgtcgtgaaatataataacagtggaagtcacaaaaatgtcccctgcccagccccctcgccgcccttgacctcctgcaggccatgtgtgtattacttgtctagtgatgtcctctcaaagtgctgtacgcgagctcggcgccacctccgcctccctttcagagcctgctccccgccctctctgctcgctgcattgtggtgttctcttctcaaggctttgaaatctccccttgcactgagattagtcgtcagatctctccccgtctccctcccaacttatacgacctgatttccttaggacggaaccgcaggcacctgcgccgggcgtcttactcccgctgcttgttctgtcccctccctcggaccaaacagtgctcatgcttcaggaccttgtttgtcgaagatgttggtttccctttctctgttatttatataaaaataatttatcaaaaggatattttaaaaaagctagtctgtcttgaaacttgtttaccttaaaattatcagaatctcagtgtttgaaagtactgaagcacaaacatatatcatctctgtaccattctgtactaaagcacttgagtctaataaataaagaaatcagcaccccttcccggtgtccagggggaaaaaaaaa

SEQ ID NO: 151 - DNA, 1224 bp, Homo sapiens
gtttccgggttgagtctggactcctaccgaactcgggcaagttatttaacacccctgagcttctttcttcatctgcaaaatggaacccctcccttcctttgaattgctgagcccattacgcgaggtaacgttgtacgacgctctctgcacagcgccaggtcccaatcccggtgttccggctcagcaggccaggagcgtttccagtttccattgcgtttctctttctgaactcttcttgcccctctcctgggaagctccccgattcttcttggcccttccttcccttccacagctccctctccaccctaagcccagcgggcccgcctccccccctccttcccggcaggtgacggcggaatcccgctgtaagctgctcagctggctgatcccggtgcaccgccaattcggcctctccttcgagtcgctgtgcctgacggtgaacactctggaccgcttcctcaccaccacgccggtgctgcagactgcttccagctgcttggggtcacctccttgctcatcgcttgcaaacaggtggaggtgcacccgccgcgcgtggaagcagcttctggccctctgctgcggcgccttctcccggcagcagctctgcaacctcgagtgcatccgtgctgcacaagctgcacttcaccctgggtgcgccaccattagcttcttcctgacatttcagcacctcctgagcgcagctaggcctccgaagctctggaagcgcaagccctggcgccggggggtggcagagctgagtctggccgactatgccttcaccagctactccccttccctcctggcgatctgctgcctggcgctggcggaccgcatgctgcgtctcgcggcccgtggacttgcgactgggagaccacccggaggcggcgctggaggactgtatgggcaagttgcagctgctggtggccataaacagtacttccttgactcacatgctgcccgttcagatctgcgagaagtgcagcctgcccccgagctcgaaataaaacagatccttcgtttccttttagtccctggcccggctgctggacctctcccgtagcctcagaagagtgcagtactggtccacagagaaggcttcaggacctgcttggtcagctgcaggttgtaaatagtgtacgatactagcatctggtattttatttattttgcagcgagcacatgaggaagctgagtctttcaccaataaacagttgtggtttgtct

SEQ ID NO: 152 - DNA, 2470 bp, Homo sapiens
aatcgcgaaacccggcgagcggcgcgctggctatcgagcgagcggggcggaaccgggagttgcgccgccgctcgggcgccgggctccgtcgcggccgcagccccgcgggtcgccctcccgtgcctcgcccgcggacaccctggccgtggacaccctggccgtgggcacccgcggggcgcggcgcgggcgctgcgcggcggcggcggcggcatgaaggtcacgtcgctcgacggcggccacgtgcgcaagatgctccgcaaggaggcggcggcgcgctgcgtggtgctcgactgccggccctatctggccttcgctgcctcgaacgtgcgcggctcgctcaacgtcaacctcaactcggtggtgctgcggcgggcccggggcggcgcggtgtcggcgcgctacgtgctgcccgacgaggcgcggcgcgcgcggctcctgcaggagggcggcggcggcgtcgcggccgtggtggtgctggaccagggcagccgccactggcagaagctgcgagaggagagcgcgtttgtcgtcctcacctcgctactcgcttgcctacccgccggcccgcgggtctacttcctcaaagggggatatgagactttctactcggaatatcctgagtgttgcgtggatgtaaaacccatttcacaagagaagattgagagtgagagagccctcatcagccagtgtggaaaaccagtggtaaatgtcagctacaggccagcttatgaccagggtggcccagttgaaatccttcccttcctctaccttggaagtgcctaccatgcatccaagtgcgagttcctcgccaacttgcacatcacagccctgctgaatgtctcccgacggacctccgaggcctgcatgacccacctacactacaaatggatccctgtggaagacagccacacggctgacattagctcccactttcaagaagcaatagacttcattgactgtgtcagggaaaagggaggaaaggtcctggtccactgtgaggctgggatctcccgttcacccaccatctgcatggcttaccttatgaagaccaagcagttccgcctgaaggaggccttcgattacatcaagcagaggaggagcatggtctcgcccaactttggcttcatgggccagctcctgcagtacgaatctgagatcctgccctccacgcccaacccccagcctccctcctgccaaggggaggcagcaggctcttcactgataggccatttgcagacactgagccctgacatgcagggtgcctactgcacattccctgcctcggtgctggcaccggtgcctacccactcaacagtctcagagctcagcagaagccctgtggcaacggcccaatcctgctaaaactgggatggaggaatcggcccagccccaagagcaactgtgatttttgtttttaagactcatggacatttcatacctgtgcaatactgaagacctcattctgtcatgctgccccagtgagatagtgagtggtcaccaggcttgcaaatgaacttcagacggacctcagggtaggttctcgggactgaaggaaggccaagccattacgggagcacagcatgtgctgactactgtacttccagacccctgccctcttgggactgcccagtccttgcacctcagagttcgccttttcatttcaagcataagccaataaatacctgcagcaacgtgggagaaagaagttgctggaccaggagaaaaggcagttatgaagccaattcattttgaaggaagcacaatttccaccttattttttgaactttggcagtttcaatgtctgtctctgttgcttcggggcataagctgatcaccgtctagttgggaaagtcaccctacagggtttgtagggacatgatcagcatcctgatttgaaccctgaaatgttgtgtagacaccctcttgggtccaatgaggtagttggttgaagtagcaagatgttggcttttctggattttttttgccatgggttcttcactgaccttggactttggcatgattcttagtcatacttgaacttgtctcattccacctcttctcagagcaactcttcctttgggaaaagagttcttcagatcatagaccaaaaaagtcataccttcgaggtggtagcagtagattccaggaggagaagggtacttgctaggtatcctgggtcagtggcggtgcaaactggtttcctcagctgcctgtccttctgtgtgcttatgtctcttgtgacaattgttttcctccctgcccctggaggttgtcttcaactgtggacttctgggatttgcagattttgcaacgtggtactacttttttttctttttgtctgttagttatttctccaggggaaaaggcaataattttctaagacccgtgtgaatgtgaagaaaagcagtatgttactggttgttgttgttgttcttgttttttatatgtaaaataaaaatagtgaaaggag

SEQ ID NO: 153 - DNA, 5415 bp, Homo sapiens
gggcgcagaggaggaaagggagcaggcgcagggggactggaaaggcagcatgcgctcgccaggagcaacctcggcgcccagggtctgaggctgcagcccagttcgccattgtgagccgccgccgggggagtccgctagcgcacgcgtgcccccgagtccccgtccgcgcacgatggggcacctgcccacggggatacacggcgcccgccgcctcctgcctctgctctggctctttgtgctgttcaagaatgctacagctttccatgtaactgtccaagatgataataacatcgttgtctcattagaagcttcagacgtcatcagtccagcatctgtgtatgttgtgaagataactggtgaatccaaaaattatttcttcgaatttgaggaattcaacagcactttgcctcctcctgttattttcaaggccagttatcatggcctttattatataatcactctggtagtggtaaatggaaatgtggtgaccaagccatccagatcaatcactgtgttaacaaaacctctacctgtaaccagtgtttccatatatgactataaaccttctcctgaaacaggagtcctgtttgaaatacattatccagaaaaatataacgttttcacaagagtgaacattagctactgggaaggtaaagacttccggacaatgctatataaagatttctttaagggaaaaacagtatttaatcactggctgccaggaatgtgttatagtaatatcacctttcagctggtatctgaggcaacttttaataaaagtacccttgttgagtacagtggtgtcagtcacgaacccaaacagcacagaactgccccttatccacctcaaaatatttccgttcgtatcgtaaacttgaacaaaaacaactgggaagaacagagtggcaatttcccagaagaatccttcatgagatcacaagatacaataggaaaagaaaaactcttccattttacagaagaaacccctgaaattccctcgggcaacatttcttccggttggcctgattttaatagcagtgactatgaaactacgtctcagccatattggtgggacagtgcatctgcagctcctgaaagtgaagatgaatttgtcagcgtacttcccatggaatacgaaaataacagtacactcagtgagacagagaagtcaacatcaggctctttctcctttttccctgtgcaaatgatattgacctggttaccacccaaaccacccactgcttttgatgggttccatatccatattgaacgagaagagaactttactgaatatttgatggtggatgaagaagcacatgaatttgttgcagaactgaaggaacctgggaaatataagttatctgtgacaacctttagttcctcaggatcttgtgaaactcgaaaaagtcagtcagcaaaatcactcagcttttatatcagtccttcaggagagtggattgaagaactgaccgagaagccgcagcacgtgagtgtccacgttttaagctcaaccactgccttgatgtcctggacatcttcccaagagaactacaacagcaccattgtgtctgtggtgtcgctgacctgccagaaacaaaaggagagccagaggcttgaaaagcagtactgcactcaggtgaactcaagcaaacctattattgaaaatctggttcctggtgcccagtaccaggttgtaatatacctaaggaaaggccctttgattggaccaccttcagatcctgtgacatttgctattgttcccacaggaataaaggatttaatgctctatcctttgggtcctacggccgtggttctgagctggaccagaccttatttaggcgtgttcagaaaatacgtggttgaaatgttttatttcaaccctgctacaatgacatcagagtggaccacctactatgaaatagcagcaactgtttccttaactgcatccgtgagaatagctaatctgctgccagcatggtactacaacttccgggttaccatggtgacgtggggagatccagaattgagctgctgtgacagctctaccatcagcttcataacagccccagtggctccggaaatcacttctgtggaatatttcaacagtctgttatatatcagttggacatatggggatgatacaacggacttgtcccattctagaatgcttcactggatggtggttgcagaaggaaaaaagaaaattaaaaagagtgtaacacgcaatgtcatgactgcaattctcagcttgcctccaggcgacatctataacctctcagtaactgcttgtactgaaagaggaagtaatacctccatgctccgccttgtcaagctagaaccagctccacccaaatcactcttcgcagtgaacaaaacccagacttcagtgactttgctgtgggtggaagagggagtagctgatttctttgaagttttctgtcaacaagttggctccagtcagaaaaccaaacttcaggaaccagttgctgtttcttcccatgtcgtgaccatctccagccttcttcctgccactgcctacaattgtagtgtcaccagctttagccatgacagccccagtgtccctacgttcatagccgtctcaacaatggttacagagatgaatcccaatgtggtagtgatctccgtgctggccatccttagcacacttttaattggactgttgcttgttaccctcattattcttaggaaaaagcatctgcagatggctagggagtgtggagctggtacatttgtcaattttgcatccttagagagggatggaaagcttccatacaactggagtaaaaatggtttaaagaagaggaaactgacaaacccggttcaactggatgactttgatgcctatattaaggatatggccaaagactctgactataaattttctcttcagtttgaggagttgaaattgattggactggatatcccacactttgctgcagatcttccactgaatcgatgtaaaaaccgttacacaaacatcctaccatatgacttcagccgtgtgagattagtctccatgaatgaagaggaaggtgcagactacatcaatgccaactatattcctggatacaactcaccccaggagtatattgccacccaggggccactgcctgaaaccagaaatgacttctggaagatggtcctgcaacaaaagtctcagattattgtcatgctcactcagtgtaatgagaaaaggagggtgaaatgtgaccattactggccattcacggaagaacctatagcctatggagacatcactgtggagatgatttcagaggaagagcaggacgactgggcctgtagacacttccggatcaactatgctgacgagatgcaggatgtgatgcattttaactacactgcatggcctgatcatggtgtgcccacagcaaatgctgcagaaagtatcctgcagtttgtacacatggtccgacagcaagctaccaagagcaaaggtcccatgatcattcactgcagtgctggcgtgggacggacaggaacattcattgccctggacaggctcttgcagcacattcgggatcatgagtttgttgacatcttagggctggtgtcagaaatgaggtcataccggatgtctatggtacagacagaggagcagtacatttttatccatcagtgtgtgcaactgatgtggatgaagaagaagcagcagttctgcatcagtgatgtcatatacgagaatgttagcaagtcctagttcagaatccggagcagagaggacatgatgtgcgcccatcctcccttgcttccagattgttttagtgggccctgatggtcatttttctaaacagaggccctgctttgtaatatgtggccaaggagataatttatctcacagaagcaccgggaagacttagccttaaagagcctacagtgtccttttggactctttcacttcgggacatttaataatggaccaaattcaacagaacaccaggaaggtcaagacgctctccaaagggcaggaagtacagcacttccgaagagtttagttggccctttgctggttgggctgagttttttatttttaagtgtttgtttttcagtgcaataatttttgtgtgtgtgtgattcttatcagaaagttgaattgttttctgcctacaccgttcatcagccccataacccaggaaggaacaggcattgttagcatcagattatacctcattattaaaaggaggcatggccacacatgaagaaatggtcattctacttcaaagaaattgagccagcactatctgtactccaacattaccggatctggattggggaggttggtcagggaagagaggggttctacccacagatcaactgtgtaatcttttactattcaagctataattcagcttcaaagtagagtagaaaaaaaattgtcttaactgttctagttcttgatggttttcttccttattaacagttggtgtttcttccttggcccttttggactaatgttactgtccaagttctttctcaagaaaccacatctggttcagaagagtgtcaagttggactctttgaactctgttgctgtctgagcaatcgtggtgcctagactttgcattccttgttctgttgacctgcatacatgtgagagctatttctttaagaactatataggctgtgaaaacgcactttctttcccccaaagagctgggaatttatgaagttatggcaatgaactgcagcatgctgggacaattatttgactacttttttttgtaatattgtcaaatgtctctatggattctgacagagatttctttttgttttgttattcttttggttgtcagtttcattttaacgagtgtaactagtaacattttattctttggattttgtataattacagtacatgattgtgtattgtgacatgaatgctgtcaaaatgacattgatggcattgtgaagcctgttactttgtgtcacttcctgataaataagaggtgatgacatggatatacaacagaaaacactttgagttgaaagtaaacacaagctggctgcttccctgtggcaaaaaaaaaaaaaatagcattcctgcacatctgtacccacgccttcttcaaagccatactatttatgtgctccggatccatcatccacaaccttaacaatgaacaagatattcgaaaaataggaggactactcaaaaccatacctctcacttcaacctccctcaccattggcagcctagcattagcaggaatacctttcctcacaggtttctactccaaagaccacatcatcgaaaccgcaaacatatcatacacaaacgcctgagccctatctattactctcatcgctacctccctgacaagcgcctatagcactcgaataattcttctcaccctaacaggtcaacctcgcttcccc

SEQ ID NO: 154 - DNA, 2665 bp, Homo sapiens
ggctctgggcatcaccagcggccccagggaaaaagaaagaaatgggaaacagcatgaaatccacccctgcgcctgccgagaggcccctgcccaacccggagggactggatagcgacttccttgccgtgctaagtgactacccgtctcctgacatcagccccccgatattccgccgaggggagaaactgcgtgtgatttctgatgaagggggctggtggaaagctatttctcttagcactggtcgagagagttacatccctggaatatgtgtggccagagtttaccatggctggctgtttgagggcctgggcagagacaaggccgaggagctgctgcagctgccagacacaaaggtcggctccttcatgatcagagagagtgagaccaagaaagggttttactcactgtcggtgagacacaggcaggtaaagcattaccgcattttccgtctgccgaacaactggtactacatttccccgaggctcaccttccagtgcctggaggacctggtgaaccactattctgaggtggctgatggcctgtgctgtgtgctcaccacgccctgcctgacacaaagcacggctgccccagcagtgagggcctccagctcacctgtcaccttgcgtcagaagactgtggactggaggagagtgtccagactgcaggaggaccccgagggaacagagaacccgcttggggtagacgagtcccttttcagctatggccttcgagagagcattgcctcttacctgtccctgaccagtgaggacaacacctcctttgatcgaaagaagaaaagcatctccctgatgtatggtggcagcaagagaaagagctcattcttctcatcaccaccttactttgaggactagccaagaacagacacaatggttcatgcccaaaaggaacagaagttccaactattgcctgggatcttgcgaaaagcgaggttccctgatccctgggagcctcacgtattttagaagccaagagaagccacatggagactcaaattcgcatcttctctatccacatcatgaccaaaggaacccctccctggtgtctgatcagggctgtggcatcacaaaacattggatcatgacatgtcgggcgatgcttggaaaagcccagcatgtatgtatgcacacattgtgtgtgtgggaaggacaaagccactctcacaagaaagggcaccaggactgctctccaaggaactggacctgtccagacagttacactccaaggtcattggagagaacttctgtatgggcaagcctgagagggagaggaaacaaaagctgtgtcctggcagaaggtctgggtttgcagatgggtgccctgaatggaactactttaactaatccatagggacttctggtatgctttcctctctttttaaaggaacttcgtgacactaaacattagcccaaaggacttcttagccttcaattgggagatacctttggtctgctcctgcaccaaagccatatgggtggaagtcagttggcctccctggttctgcagagggccagaagaatgagagagaggaagactgctggcagggaaatcgaggaggcgagactagaactgcaccagcttccctgatgtctgcagccatggctttgcagcgcaaacagaacttctctgggatgctgggattcttgcctgtatgaatgcatcaagtattcatttattgcccgaataggcattgcattaagtcctctgttaggtgtcaggcaagccaaaaaaaaaaaaaagatgctaagtcctaacccccaacagaagtgttcacagtgtagacgggaaaaaatgtataaacaaatgtgtaaaaagagaaatcagctcatggcttaggatggaattagagacaggtgagggacactcaggagctcattttccagctgctcttcagagtggaagggctggctggatcgggtaggtaagaatagctggattttttagaaaagaaatggatacagtctaaagaattaactcacccggtactttattctaagaagggtctggcatccatatgaggaaaaatgctcagctccaggaaagatggggagtccaagtggattaatgatgtcatgcataattttaagagacaagggagaaaacacaatgtatagccagagaaggagaagctcccatccaaatcctactaggaagagagtgggctgcagatgaatctgtgactcatgtttccctgtttcaaagggatcctggggaaggaggggaacatgcttgcagtatctctccctgtctgtctgctcacataagcattccgtccatctaagctcatcgtgctactggtatgtgtatgtgcagttacacagtttcctgtatcataaatcctagtgtgtttatacaaggagacatctgtggtttccccaaccgttccaaaaggctatttcaaaggaaccagcccacgtatgagaaatgaatgtaacactgtggacattgacttcccgcataaggcagggtgaccccctgaactccagatgtttgcacagtatcttatgtgttgttttccgttgtgacgaatgtgattggaacatttggggagcacccagagggatttttcagtgggaagcattacactttgctaaatcatgtatttattcctgattaaaacaaacctaataaatatttaacccttggc

SEQ ID NO: 155 - DNA, 1357 bp, Homo sapiens
gaattccggagcctctagttcgttagtcaaaacgtgaaaaaaaagacctgctttgccctgggaaatagtaaccctgccaaatacatcagcttgtaggagacaggtaggatgtgatggagctgcttgaagaagatctcacatgccctatttgttgtagtctgtttgatgatccacgggttttgccttgctcccacaacttctgcaaaaaatgcttagaaggtatcttagaagggagtgtgcggaattccttgtggagaccagctccattcaagtgtcctacatgccgtaaggaaacttcagctactggaattaatagcctgcaggttaattactccctgaagggtattgtggaaaagtataacaagatcaagatctctcccaaaatgccagtatgcaaaggacacttggggcagcctctcaacattttctgcctgactgatatgcagctgatttgtgggatctgtgctactcgtggggagcacaccaaacatgtcttctgttctattgaagatgcctatgctcaggaaagggatgcctttgagtccctcttccagagctttgagacctggcgtcggggagatgctctttctcgcttggataccttggaaactagtaagaggaaatccctacagttactgactaaagattcagataaagtgaaggaattttttgagaagttacaacacacactggatcaaaagaagaatgaaattctgtctgactttgagaccatgaaacttgctgttatgcaagcatatgacccagagatcaacaaactcaacaccatcttgcaggagcaacggatggcctttaacattgctgaggctttcaaagatgtgtcagaacccattgtatttctgcaacagatgcaggagtttagagagaaaatcaaagtaatcaaggaaactcctttacctccctctaatttgcctgcaagccctttaatgaagaactttgataccagtcagtgggaagacataaaactagtcgatgtggataaactttctttgcctcaagacactggcacattcattagcaagattccctggagcttttataagttatttttgctaatccttctgcttggccttgtcattgtctttggtcctaccatgttcctagaatggtcattatttgatgacctggcaacttggaaaggctgtctttcaaacttcacttcctatctgactaaaacagccgatttcatagaacaatcagttttttactgggaacaggtgacagatgggtttttcattttcaatgaaagattcaagaattttactttggtggtactgaacaatgtggcagaatttgtgtgcaaatataaactattataaaatctaaaaaaaaggaattc

SEQ ID NO: 156 - DNA, 1314 bp, Homo sapiens
atggcatccgttgcagttgatccacaaccgagtgtggtgactcgggtggtcaacctgcccttggtgagctccacgtatgacctcatgtcctcagcctatctcagtacaaaggaccagtatccctacctgaagtctgtgtgtgagatggcagagaacggtgtgaagaccatcacctccgtggccatgaccagtgctctgcccatcatccagaagctagagccgcaaattgcagttgccaatacctatgcctgtaaggggctagacaggattgaggagagactgcctattctgaatcagccatcaactcagattgttgccaatgccaaaggcgctgtgactggggcaaaagatgctgtgacgactactgtgactggggccaaggattctgtggccagcacgatcacaggggtgatggacaagaccaaaggggcagtgactggcagtgtggagaagaccaagtctgtggtcagtggcagcattaacacagtcttggggagtcggatgatgcagctcgtgagcagtggcgtagaaaatgcactcaccaaatcagagctgttggtagaacagtacctccctctcactgaggaagaactagaaaaagaagcaaaaaaagttgaaggatttgatctggttcagaagccaagttattatgttagactgggatccctgtctaccaagcttcactcccgtgcctaccagcaggctctcagcagggttaaagaagctaagcaaaaaagccaacagaccatttctcagctccattctactgttcacctgattgaatttgccaggaagaatgtgtatagtgccaatcagaaaattcaggatgctcaggataagctctacctctcatgggtagagtggaaaaggagcattggatatgatgatactgatgagtcccactgtgctgagcaatttgagtcacgtactcttgcaattgcccgcaacctgactcagcagctccagaccacgtgccacaccctcctgtccaacatccaaggtgtaccacagaacatccaagatcaagccaagcacatgggggtgatggcaggcgacatctactcagtgttccgcaatgctgcctcctttaaagaagtgtctgacagcctcctcacttctagcaaggggcagctgcagaaaatgaaggaatctttagatgacgtgatggattatcttgttaacaacacgcccctcaactggctggtaggtcccttttatcctcagctgactgagtctcagaatgctcaggaccaaggtgcagagatggacaagagcagccaggagacccagcgatctgagcataaaactcattaa

SEQ ID NO: 157 - DNA, 4950 bp, Homo sapiens
ccaagcctgagtgttaatttaactctatgttgtccgccgtgtaaacatccgaggtcatttgttgcgttgaattatctgaccatccttttttactgtgactcttcccattctctttggcaagaagtccccttctcgcccccaaaccagcaagggactcccccacctgggtctgtgccctgccccgcgctgggggccgagtccttgaatgtggcttcaggggctcctgtcctgacggttgcgtccgggggaggggaaggaagggccgctgtcgccaaggttttctctcccagaacccacagtgggccgccgcgatggccctcaagatggtgaagggcagcatcgaccgcatgttcgacaagaatctgcaggacttggtccgcggcatccgtaaccacaaggaggacgaggcaaaatacatatctcagtgcattgatgagatcaagcaggagctgaagcaggacaacatagcggtgaaggcgaacgcggtctgcaagctgacgtatttacagatgttgggatacgacatcagctgggccgccttcaacatcatagaagtgatgagtgcctccaagttcaccttcaagcgaattggctacctcgctgcttcccagagctttcacgaaggcaccgacgtcatcatgctgaccaccaatcagatccgtaaggacttgagcagccccagccagtacgacacaggtgttgcactgacgggtctgtcctgcttcgtcaccccagaccttgccagagacctggcaaatgacatcatgacactgatgtcacacaccaagccctacatcaggaagaaggctgtgctgatcatgtacaaggtgttcctgaagtaccccgagtcgctgcgccctgcctttccccggctgaaggagaagctggaggaccccgaccccggggttcagtcggctgccgtcaatgtcatctgcgagctggccagacgcaaccctaagaactacctgtccctggccccgctctttttcaagctgatgacgtcctccaccaacaactgggtcctcatcaagatcatcaagctgttcggtgctcttactcctttggaaccgcggctgggcaagaagctgatcgagcccctcaccaatctcatccacagcacgtctgccatgtctctcctctatgaatgtgtgaacaccgtgattgcagtgctcatctcgctgtcctccggcatgcccaaccacagcgccagcatccagctttgtgttcagaaattaaggatattgatcgaggactccgatcagaacttgaagtacctggggctgctggcaatgtccaagatcctgaagacccaccccaagtccgtgcagtcccacaaggacctcatcctgcagtgcctggacgacaaggacgagtccatccggctgcgggccctggacctgctctatgggatggtgtccaagaagaacctgatggagatcgtgaagaagctgatgacccacgtagacaaggcagagggtaccacctaccgtgacgagctgctcaccaagatcattgacatctgcagccagtccaactaccagtacatcaccaacttcgagtggtacatcagcatcctggtggagctgacccggctggagggcacacggcacggccacctcatcgccgcccaaatgctggacgtggccatccgcgtgaaggccatccgcaagttcgccgtgtcccagatgtctgcgctgcttgacagtgcacacctgctggccagcagcacccagcggaacgggatctgtgaggtgctgtacgctgccgcctggatctgcggggagttctcagagcatctgcaggaaccacaccacactttggaggccatgctgcggcccagagtcaccacgctgccaggccacatccaggccgtgtatgtgcagaacgtggtcaagctctacgcctccatcctgcagcagaaggagcaggccggggaggcagagggcgctcaggccgtcacccagctcatggtggaccggctgccccagtttgtgcagagcgcagacctggaggtgcaggagcgggcgtcctgcatcctgcagctggtcaagcacatccagaagcttcaggccaaggacgtgcctgtggcagaggaggtcagcgctctctttgctggggagctgaacccagtggcccccaaggcccagaagaaggttccagtccccgaaggcctggacctggacgcctggatcaatgagccactctcggacagcgagtcagaggacgagaggcccagggccgtcttccacgaggaggagcagcggcgtcccaagcaccggccgtcggaggcggacgaggaggagctggctcggcgccgagaggcccggaagcaggagcaggccaacaaccccttctacatcaagagctcgccatcgccacagaagcggtaccaggacaccccgggcgtggagcacattcccgtggtgcagattgacctctccgtccccttgaaggttccagggctgcctatgtcagatcagtatgtgaagctggaggaggagcggcggcaccggcagaagctggagaaggacaagaggaggaaaaagaggaaggagaaggagaagaagggcaagcgccgccacagctcgctgcccacggagagcgacgaggacatcgcccctgcccagcaggtggacatcgtcacagaggagatgcctgagaatgctctgcccagcgacgaggatgacaaagaccccaacgacccctacagggctctggatattgacctggataagcccttagccgacagcgagaaactgcctattcagaaacacagaaacaccgagacctcaaaatcccctgagaaggacgttcccatggtagaaaagaagagcaagaaacccaagaagaaagagaaaaaacacaaagagaaagagagagacaaggagaagaagaaggagaaggagaagaagaaatctcccaagcctaagaagaagaaacacaggaaggagaaggaggagcggaccaaaggcaagaagaagtccaagaagcagcctccaggcagcgaggaggcagcgggggagccggtgcagaatggcgcgccagaggaggagcagctcccgcctgagtccagctactccctcctcgctgaaaattcctatgttaaaatgacctgtgacatccggggcagtctgcaggaggacagccaggtcactgtggccatcgtgctggagaacaggagcagcagcatcctcaagggcatggagctcagcgtgctggactcactcaatgccaggatggcccggccgcagggctcctccgtccacgatggcgtccccgtgcctttccagctgcccccaggcgtctccaacgaagcccagtatgtgttcaccatccagagcatcgtcatggcgcagaagctcaaggggaccctgtccttcattgccaagaatgacgagggtgcgacccacgagaagctggacttcaggctgcacttcagctgcagctcctacttgatcaccactccctgctacagtgacgcctttgctaagttgctggagtctggggacttgagcatgagctcaatcaaagtcgatggcattcggatgtccttccagaatcttctggcgaagatctgttttcaccaccatttttccgttgtggagcgagtggactcctgcgcctccatgtacagccgctccatccagggccaccatgtctgcctcctggtgaaaaagggtgagaactctgtctcagtcgacgggaagtgcagtgactccacgctactgagcaacttgttagaagagatgaaggcgacgctggccaagtgttgagagctgcctgcgagccccgcaccaccccgcggagcacgtacccagggaccgcagccctgacgtgtctcgcctctcctcagtcgtgtgtactgtacccaagcctgagtgttaatttaactctatgttgtccgccgtgtagacatccgaggtcatttgttgcgttgaattatctgaccatccttttttactgtgactcttcccattctctttggcaagaagtccccttctcgcccccaaaccagcaagggactcccccacctgggtctgtgccctgccccgcgctgggggccgagtccttgaatgtggcttcaggggctcctgtcctgggccagggcctgatgggcaccacgtgaggggcacttggtggacagggcggggctgacgtggcctcctctggggtcgcctgcttttgacccaaaggtcctgacggttgcgtccgggggaggggaaggaagggccgctgtcgccaaggttttctctcccagaacccacagtgggaaagcggtcttgccaggcgttgtccattgtcagtgtgctcgtgggctggtgactgggtcttgggatcccaggccacgcgccagccaggctgtgggcagggcggggccagggacgccaaagagaggttgcagtcagaaccgtggacggggtgggttgaggcctctctgccacccgtcttcctggtcagcagaagtgcatctcggcttgggtttggggtggtccgcatcccctgcttgccactatgcgcaccaaggtttccccacatccttcccagcacccttaggaaggcccaggcagggcctggaagcagcggacctgggctgttctgtgttgaaggagtgtgcccagtgcccttgggcaggacctgtgagagccacctcacaggcagagcccccaccaggcagggcaaggagactccgctcactccccacggccagcgtgggcacaggactgacccttcttcagagataatgacattttatcttctccttttgatgaaaactgtcactttagcatgtaatccattacagaatcccatgcagtgattccaggatttgaaattgtatgatgtgttacataagaatttatttgctatcgacattcccgtataaagagagagacatatcacgctgctgtcatgattttgtgtcaagatgatccaataaagttgtaaaacagg

SEQ ID NO: 158 - DNA, 4012 bp, Homo sapiens
tgggtttttaccagcaacaaaaaatttattgaatgagaagaaccatggtgtcctccacacatctgtagtcctcctcacagaaatgtgtgagcgaagcccagacatgcttgcgcatttcagagagaatgaaaagcttgtgccccaattagttcgtattttaaagaacctcatcatgtccggatattcaccaggacatgatgtttctggtatcagtgacccctttttgcaggtacgaattttgcggttattaagaattttaggacgaaatgatgatgattcaagtgaagctatgaatgatatattagcacaggttgccactaatactgagactagtaaaaatgtaggaaatgctattctttatgaaacggttttgactatcatggatattaagtcagagagtggattgcgagtcctagccataaatatcctgggtcgtttcttattgaacaatgacaagaatattaggtatgtggctctgacatctttgttgaagactgtacagacagatcataatgcagtacagaggcacagaagcacaattgtggactgtcttaaagatttggatgtctcaataaaacggcgtgcaatggaattgagttttgccctggtaaatgggaataatatccgaggcatgatgaaagaattactttattttctggattcgtgtgagccagaatttaaagcagactgtgcatctggaatctttcttgctgcagaaaagtatgcaccttccaaacgatggcatatagacacaattatgcgtgttttgacaacggcaggaagttatgttcgtgatgatgcagtccccaatttaatccagttaataactaatagtgtggagatgcatgcctatactgtccagcgcctgtacaaagcaattcttggtgattattctcaacaacctttggtacaagtggctgcatggtgtataggtgaatatggtgatcttcttgtatctggccagtgtgaagaggaagagcctattcaggtaacagaggatgaagtgttggatattttagaaagtgtcctaatctctaatatgtccacctctgtgacacgaggttatgccctcactgccattatgaagctttccactcgattcacttgtactgtaaaccgaattaagaaagtggtttccatctacggaagcagcattgatgtggaactccagcggagggcagtagaatataatgcacttttcaagaaatatgaccacatgaggtctgccctacttgagagaatgcctgtcatggaaaaagtgaccacaaatggccctactgagattgtgcagacaaatggagagacagaaccagctccactagagaccaaaccgccaccctctgggccacagcccaccagccaggccaatgatttattggatttgttgggaggaaatgacataacacctgttattccaactgcgcctacaagcaaaccatcttctgctggtggagaacttcttgatttgctgggagacatcaaccttacagggtctcactctgtcagccaggctggagtgcagtgggattatctcggctcacttcaacctctgcctcctgcgttcaggtgagcctcctgcctcggcctcctgagtagctgggattataggcgaatgccaccatgcccggctaattttttgtatttttagtagagacggggttttgctgtcttctttaaggggataatgaagagttaaagcacacatgaccttgagtaaaaaatagacataggataacaagttggatggttagctaagctcattcccacaggctgattttttttttcctaatacagtggagtcacagagtataggatttatgtctgtgtcttaacaaaatttcaaaatgttacttgtcatgtacttatgaatcatttacaaatggtcaatttcaaatcctcaaatgtcaaagctgtactggataaccggcaaagaaaaaacaaccccacagttaaaccatagcatatacttcacctaatatgttagtatttccatgttaatatatatagccttcataattataattttaggtgactaatactttatcaacaaatttgctctgtttactcagttcgttagtattgggtagtttggcttttttttttggtttttttgaaacggaatcttgctttgttgcccgggctggagtgcaacagcacgatcgcggctcactgcaacctctgcctcccgggttcaagtgattctcctgcctcagcctcccgagtagctgggatttataggcacgtgccaccatgcccagctaatttttgtatttttttatttgagatggggtttcaccatgttggccaggctggtcttgaactcctgacctcggatgatcctcccgccttggcctcccaaagtgctgggattacaggcatgagtcaccgcacccagccagtatggggtattttgtttctagatttttctacctagcggccccaacaaatattacatcaatttgttcttattttagattaatttgttagactaagtgacttagtctttctgaatctggttaaaattaggatgattaatacttactccataagatatttgtgaggcccattgacctattcagtgcatgatacatagtaggcacttggtaaatattatttaccttttcctcaatttatatgtttaaccgcacagtcataagcattgtatattatcattttaaaaagccctattgggtgaaaatttggtcctattatattttatttttattattatttttttaaattttgtagccctctgccaggcttggtcagcagagagaggccctattattttttgatcacagagcgagactccatctcaaaaaaaaaaaaaaaaaaaaaaattattctgtaccatcacaacttttcacaacgatggcaagccttatgtcttgggagcctgttttgctaggcaaagttacaagtgacctaatgggagctcaaatgtgtgtgtgtctctctgtgtgtttgtgtgtgtgtgtgcactcaagacctctaacagcctcgaagcctggggtggcatcccggccttgccattagcatgcctcatgcatcatcagatgacaaggacaaccctcatgacgaagcaacatgaattagggggcctcttggccttggtccaaaattgtcaatcagaaatgaacataaaggactccagagcagtgggactgtctgtcaaaagactctgtatatcttttgcggatgagttttgtgagagaacagagagaccattgtacctggcacaagggctcttcatgaaaagggagacttactgggaggtgcaagacagtggcatttctcctctcctcttgctgctcagcacagccctggattgcagccccgaggctgagaccagacaaagcccgggaggcagaaagatgctccaagaaccaacactatcaatgtctttgcaaatcctcacaggattcctgtgggtccagctttggaactgggaaacctttcttcggatccgcactcattccactgatgccagctgcccctgaaggatgccagtactgtggtgtgtgagtctcagcagccgcccacacgctcctaactctgctgcatggcagatgcctaggtggaaatagcaaaaacaaggcccgggctggggccagggccagaggggaaggccctggattctcactcatgtgagatcttgaatctctttctttgttctgtttgtttagttagtatcatctggtaaaatagttaaaaaacaacaaaaaactctgtatctgtttctagcatgtgctgcattgactctattaatcacatttcaaattcaccctacattcctctcctcttcactagcctctctgaaggtgtcctggccagccctggagaagcactggtgtctgcagcacccctcagttcctgtgcctcagcccacaggccactgtgataatggtctgtttagcacttctgtatttattgtaagaatgattataatgaagatacacactgtaactgcaagaaattataaatgtttttcacaaaaaaaaaaaaaaaaaaa

SEQ ID NO: 159 - DNA, 359 bp, Homo sapiens
ctatgggcagtatgatctgtggctgggataagaagggtcctggactctactacgtggatgaacatgggactcggctctcaggaaatatgttctccacgggtagtgggaacacttatgcctacggggtcatggacagtggctatcggcctaatcttagccctgaagaggcctatgaccttggccgcagggctattgcttatgccactcacagagacagctattctggaggcgttgtcaatatgtaccacatgaaggaagatggttgggtgaaagtagaaagtacagatgtcagtgacctgctgcaccagtaccgggaagccaatcaataatggtggtggtggcagctgggcaggtctcct

SEQ ID NO: 160 - DNA, 1221 bp, Homo sapiens
cgcaggctggaaggaagacgaacctacgaagcagagatctgaagacagcatgtacacagccattccccagagtggctctccattcccaggctcagtgcaggatccaggcctgcatgtgtggcgggtggagaagctgaagccggtgcctgtggcgcaagagaaccagggcgtcttcttctcgggggactcctacctagtgctgcacaatggcccagaagaggtttcccatctgcacctgtggataggccagcagtcatcccgggatgagcagggggcctgtgccgtgctggctgtgcacctcaacacgctgctgggagagcggcctgtgcagcaccgcgaggtgcagggcaatgagtctgacctcttcatgagctacttcccacggggcctcaagtaccaggaaggtggtgtggagtcagcatttcacaagacctccacaggagccccagctgccatcaagaaactctaccaggtgaaggggaagaagaacatccgtgccaccgagcgggcactgaactgggacagcttcaacactggggactgcttcatcctggacctgggccagaacatcttcgcctggtgtggtggaaagtccaacatcctggaacgcaacaaggcgagggacctggccctggccatccgggacagtgagcgacagggcaaggcccaggtggagattgtcactgatggggaggagcctgctgagatgatccaggtcctgggccccaagcctgctctgaaggagggcaaccctgaggaagacctcacagctgacaaggcaaatgcccaggccgcagctctgtataaggtctctgatgccactggacagatgaacctgaccaaggtggctgactccagcccctttgcccttgaactgctgatatctgatgactgctttgtgctggacaacgggctctgtggcaagatctatatctggaaggggcgaaaagcgaatgagaaggagcggcaggcagccctgcaggtggccgagggcttcatctcgcgcatgcagtacgccccgaacactcaggtggagattctgcctcagggccgtgagagtcccatcttcaagcaatttttcaaggactggaaatgagggtgggcgtcttcctgccccatgctcccctgccccccaccacctgcctgcttgcttctctggctgcctggtcagtgcagaggtgccccctgcagatgttcaataaaggagacaagtgctttccc

SEQ ID NO: 161 - DNA, 1397 bp, Homo sapiens
cacgaggtccctgcatatcgtcatgttgggcttggactcggccggcaagaccacggtgctctaccggctcaagttcaacgagttcgtgaacacggtgcccaccatcggcttcaacaccgagaagatcaagctgagcaacggcacggccaagggcatcagctgccacttctgggacgtgggcggccaggagaagctgcggccgctgtggaagtcctacagccgctgcacggacggcatcatctacgtggtggactcggtggacgtggaccggctggaggaggccaagacggagctgcacaaggtgaccaagttcgccgagaaccagggcacgccgctgctggtcatcgccaacaagcaggacctgcccaagtcgctgccggtggcagagattgagaagcagctggcgctgcacgagcttatcccggccaccacctatcacgtccagccggcgtgcgccatcatcggcgagggcctcaccgagggcatggacaagctctatgagatgatcctgaaacgcaggaagtccctcaagcagaagaagaagcggtaatgcgcccggagcgaccggggagcgagcgagtgcgtcaagaaagaatgaatggatggatggatggttggatggatggatggatggatgagcgagaacccgcgcccgcgaacaaagagcgaaccaaagcgatgcttcgaatttttaaaacggaatctctgcacccaaatgcaggactggtgacttaaggagctgcgaagtctgatttaccggcctactctcgacctgccccccacccccagctcaggggaccttttgtctgaacgccagagctactgaccaggtcggggggccgcggtggggagtggaagagccggtcctgctgtccgccctcccagccccaggtggaaggctcagttgtcggaaagacaaaaagcgatttcttcccactcctgcagggccagaagttcaggctgccccgcctccactgggggatcgcacctgtgaattacctgaggtatgcatttcccagaaccgtgggcgtacccaccttggggggcatgttggttctggggggaccacctctccttgcattcaggggctgtgaagctgagtaattttcggtcacagggcaggcccctgttgaaatttcatttgtcctgctctgggcccaaaggtggtggtggtttgggtcatcagaggactgcctgggacggttcagcgggcacggagcgctgtgctggcctggctggggatggccgcggaggtgcccttttcctggtgctttgtggtggctgcagaagaccagttttgttgagaactgcttttcagcctggaatcagacatcttccagatggtttggaccctgtccatgtgtaggtcattatcacacaaagagaccaataaaaat

SEQ ID NO: 162 - DNA, 1190 bp, Homo sapiens
gccctccacaaagctcctgggcccctcctcccttcaaggattgcgaagaactggtcgcaaatcctcctaagccaccagcatctcggtcttcagctcacaccagccttgagcccagcctgcggccaggggaccacgcacgtcccacccacccagcgactccccagccgctgcccactcttcctcactcatggggaacagcaaaagtggggccctgtccaaggagatcctggaggagctgcagctgaacaccaagttctcggaggaggagctgtgctcctggtaccagtccttcctgaaggactgtcccaccggccgcatcacccagcagcagttccagagcatctacgccaagttcttccccgacaccgaccccaaggcctacgcccagcatgtgttccgcagcttcgattccaacctcgacggcaccctggacttcaaggagtacgtcatcgccctgcacatgaccaccgcgggcaagaccaaccagaagctggagtgggccttctccctctacgacgtggacggtaacgggaccatcagcaagaatgaagtgctggagatcgtcatggctattttcaaaatgatcactcccgaggacgtgaagctccttccagacgatgaaaacacgccggaaaagcgagccgagaagatctggaagtactttggaaagaatgatgatgataaacttacagagaaagaattcattgaggggacactggccaataaggaaattctgcgactgatccagtttgagcctcaaaaagtgaaggaaaagatgaagaacgcctgatgccaactgttcagctgtcctccctccacctaccactcacatgacacccgtgagcgcctgtgcacacacacacacatgcacacacacgcgcgcgcacacacacacacacacatccaccccagggccaagagaaaggcctgcacacaagcccacagcacagctccctgccaaactgaagcatctgtagtgacccactggttccttcttcctgggtcttcagcattccctcccatcatgcccggtcccacccctccctctgtccaccagcccatgtccctgtgctaatcccaggattaggccataggagtcctaagtgtcaccccgctgtaagctcctttgtggagtgctgggtaagcagtttccaataaacgcaagctgagctggaaaaaaaaaaaaaaaa

SEQ ID NO: 163 - DNA, 1064 bp, Homo sapiens
  misc_feature (27)..(766): Each "n" represents a nucleotide selected from a, t, g or c, or contains no nucleotide.  The "n" residue at position 766 is "g" according to GRO3 gene sequence in the Entrez human genome sequence database.
cacagccgggtcgcaggcacctccccngccagctctcccgcattctgcacagcttcccgacgcgtctgctgagccccatggcccacgccacgctctccgccgcccccagcaatccccggctcctgcgggtggcgctgctgctcctgctcctggtgggcagccggcgcgcagcaggagcgtccgtggtcactgaactgcgctgccagtgcttgcagacactgcagggaattcacctcaagaacatccaaagtgtgaatgtaaggtcccccggaccccactgcgcccaaaccgaagtcatagccacactcaagaatgggaagaaagcttgtctcaaccccgcatcccccatggttcagaaaatcatcgaaaagatactgaacaaggggagcaccaactgacaggagagaagtaagaagcttatcagcgtatcattgacacttcctgcagggtggtccctgcccttaccagagctgaaaatgaaaaagagaacagcagctttctagggacagctggaaagggacttaatgtgtttgactatttcttacgagggttctacttatttatgtatttatttttgaaagcttgtattttaatattttacatgctgttatttaaagatgtgagtgtgtttcatcaaacatagctcagtcctgattatttaattggaatatgatgggttttaaatgtgtcattaaactaatatttagtgggagaccataatgtgtcagccaccttgataaatgacagggtggggaactggagggtngggggattgaaatgcaagcaattagtggatcactgttagggtaagggaatgtatgtacacatctattttttatacttttttttttaaaaaagaatgtcagttgttatttattcaaattatctcacattatgtgttcaacatttttatgctgaagtttcccttagacattttatgtcttgcttgtagggcataatgccttgtttaatgtccattctgcagcgtttctctttcccttggaaaagagaatttatcattactgttacatttgtacaaatgacatgataataaaagttttatg

SEQ ID NO: 164 - DNA, 1847 bp, Homo sapiens
gaagcatacatgttttccttttgtttttgaaacttgtttgtaaacataaataaatatgcccttttattaaataaattcatggcaatgtttttttaaaagacatttcagcttctttactcagttctgcatatacagtgcatcagtctgttctctttgaccacaattggaatacatttcaagatggtaacagccccatgaagtaccgctttaattccttgctggtaatctaatagaatcagattaagaaaattaacacaattttaccatttgacatactcttcattgaatttagtttgtctaaaatagtctcacaggtaaaaaacataacaacaatgaccaccattgtctttgatacatttattttaattcttaagtggccaaataacagattaggtaaaatgagattacatgaaaaggttctaaaatgatatatttagatgcaataattaaccatatgctagaatgcccacctctaagccaattggattctttagctctctttttctttccttcatctaccttcttctcttttttgcctctgtctttaccctttagaaactggcatgtgttagggcccagatttcaccagatacacaatcctcaggctgacataaagtttacgaggactgctactataactgagagtgctgaccaagcaaagaaacatttagttgatggtgcttgatatttttggtgggtgggggaaatctttttctcaccatcaaatctttgcagtaatcctctgcaggtcttagaaacacattggctctgtcagcatttgtaattgtacatttattcatcaggtatttatagtgaatcatactgtaaaaaagaggtagcatgatatgctggaaagcatattagactaggagtcaagacctggtttctagtcttggttttgccattaatgtgctgcatgatcttgggaaaatcatttaccctaaataagggtggtggactatcttgaagaaccctttcaactctaaaaattgaccctatcaactggagagcccacaaggcatagggaatagagaaaagggaaatgttttcagttttcttttttattttggttatgcttaaatatgaatgtaattaccaaaagatttagaagtgcatgtgctttggaggatttgtattgagcttttacagtattcatttttcaactcaaggcaatggctttctacaccaactctaatccataaacgggtcttatgacatctatgaagtagtagcaagacatgcttagtgtgtatttctctctttgagacactgtaatttctaccagaaatttccagagcattatgtaggtagaaaaaaatgcaagcaagctgttaaagatcttggatcccattatatagtatgtatagctgaaatctgtaattcaatcactttttctcttttatcctctaaccaaaaaattgtttaattttgcatcccaaatgtttttaatctttgtatattttttaaaaatccttttctcctcatcattgccttttttgtggttgtaaatagacttacttgcactttgaagatgagttactccttgtcatcttacaaatatgtgatatggtaattttcataacagatgtcagttttgaaccaagaattggtgatttgtttataagaaaaaaactggcttcatttctgtgaaattgctctttgaaaatttctttttacacgtgtaagccaactgagataccgtgatggtgttgatttctttcaatgatgcttaccatctattttagccactgagccttttattatttgtctatttgtaaagtttatttgtcttaactcatttaataaatatactgtttatctgtttctgaaaaaaaaaaaaaaaaaaa

SEQ ID NO: 165 - DNA, 2254 bp, Homo sapiens
aaagaaccgcacaccacagactccctccagctctttgtgtgtggctctctcagggtccaacaagagcaagctgtgggtctgtgagtgtttatgtgtgcttttattcacttcacacttattgaaaagtgtgtatgtgagagggtggggtgtgtgtgtcaaagagagtgaggaagagaaggagagagagatcaattgattctgcagcctcagctccagcatccctcagttgggagcttccaaagccgggtgatcacttggggtgcatagctcggagatgcagtccccctggaaaatccttacggtggcgcctctattcttgctcctgtctcttcagtcctcggcctctccagccaacgatgaccagtccaggcccagcctctcgaatgggcacacctgtgtagggtgtgtgctggtggtgtctgtaatagaacagcttgctcaagttcacaactcgacggtccaggcctcgatggagagactgtgcagctacctgcctgaaaaactgttcttgaaaaccacctgctatttagtcattgacaagtttggatcagacatcataaaactgcttagcgcagatatgaatgctgatgtggtatgtcacactctggagttttgtaaacagaacactggccaaccattgtgtcatctctaccctcttcccaaggagacatggaaatttacactacagaaggcaagacaaattgtcaagaagtccccgattctgaaatattctagaagtggttctgacatttgttcactcccggttttggccaagatctgccagaaaattaaattagctatggaacagtctgtgccattcaaagatgtggattcagacaaatacagcgttttcccaacactgcggggctatcactggcgggggagagactgtaatgacagcgacgagtcagtgtacccaggtagaaggccgaacaactgggatgtccatcaggattcaaactgtaatggcatttggggtgtcgatccaaaagatggagttccatatgagaagaaattctgtgaaggttcacagcccaggggaatcattttgctgggagactcagctggggctcattttcacatctctcctgaatggatcacagcgtcgcagatgtctttgaactctttcatcaatctaccaacagcccttaccaacgagcttgactggccccaactctctggtgctacaggatttctggactccactgttggaattaaagaaaaatctatttaccttcgcttatggaaaagaaaccactgtaatcacagggactaccagaatatttcaagaaatggtgcatcttcccgaaacctgaagaaatttatagaaagcttgtctagaaacaaggtgttggactatcccgccatcgttatatatgccatgattggaaatgatgtctgcagtgggaagagtgacccagtcccagccatgaccactcctgagaaactctactccaacgtcatgcagactctgaagcatctaaattcccacctgcccaatggcagccatgttattttgtatggcttaccagatggaacctttctctgggataatttgcacaacagatatcatcctctcggccagctaaataaagacatgacctatgcgcagttgtactccttcctgaactgcctccaggtcagcccctgccacggctggatgtcttccaacaagacgttgcggactctcacttcagagagagcagagcaactctccaacacactgaaaaaaattgcagccagtgagaaatttacaaacttcaatcttttctacatggattttgccttccatgaaatcatacaggagtggcagaagagaggcggacagccctggcagctcatcgagcccgtggatggattccaccccaacgaggtggctttgctgttgttggcggatcatttctggaaaaaggtgcagctccagtggccccaaatcctgggaaaggagaatccgttcaacccccagattaaacaggtgtttggagaccaaggcgggcactgagcctctcaggagcatgcacccctggggagcacagggaggcagaggcttgggtaaactcattccacaaaccctatgggggctgccacgtcacaggcccaaaggactcttcttcagcagcatctttgcaaaatgtctttctctcaatgaagagcatatctggacgactgtgcaatgctgtgtgctcccggggatcagtaacccttccgctgttcctgaaataacctttcataaagtgctttgggtgccattcca

SEQ ID NO: 166 - DNA, 1815 bp, Homo sapiens
gctgctgaggcgtggtaatggcgtcccgcggccggcgtccggagcatggcggacccccagagctgttttatgacgagacagaagcccggaaatacgttcgcaactcacggatgattgatatccagaccaggatggctgggcgagcattggagcttctttatctgccagagaataagccctgttacctgctggatattggctgtggcactgggctgagtggaagttatctgtcagatgaagggcactattgggtgggcctggatatcagccctgccatgctggatgaggctgtggaccgagagatagagggagacctgctgctgggggatatgggccagggcatcccattcaagccaggcacatttgatggttgcatcagcatttctgctgtgcagtggctctgtaatgctaacaagaagtctgaaaaccctgccaagcgcctgtactgcttttttgcttctcttttttctgttctcgtccggggatcccgagctgtcctgcagctgtaccctgagaactcagagcaggtgagtccctcggctactgggtgtgccggggagttgggggactcaacaggtaagctgtcctggggaagcgacaaagaatcttatgcagattggcgggaaaaggaggaaacatgcaccctagtgtggcccctgatggcacatttgatgacctgatatcctaagggggtggcatctgcggaggtggggtgggatgccttctcttggtagatgacatggtattacagataaggtgatgcgactgatttccataaccaaataagtaaatgccatttaggaagggtgagagggcaccgacagttctccgttgtgtgatgtataaattaaggaatggcggagtaggatgtagatgttgaaagataagtgaagagctgttcctgactaataacatgaatgactctggattccaattggtggccatctccctaaacttgagtggggagctgggtccctgcactggaaagtgagaatgaggggagttgctttgttctgtaattctcctgagggaggtgtgggccatgccagattctagcctgtacttttctctacgtggcttacagcgaccttaagttctcccaggcaggatttgtcctggagcagactggcttctgaaggaggggagggaggtgaagctgtctgctcctctcaacctccgctgcctgacccgctgcctttctttcctcagttggagctgatcacaacccaggccacaaaggcaggcttctccggtggcatggtggtagactaccctaacagtgccaaagcaaagaaattctacctctgcttgttttctgggccttcgacctttataccagaggggctgagtgaaaatcaggatgaagttgaacccagggagtctgtgttcaccaatgagaggttcccattaaggatgtcgaggcggggaatggtgaggaagagtcgggcatgggtgctggagaagaaggagcggcacaggcgccagggcagggaagtcagacctgacacccagtacaccggccgcaagcgcaagccccgcttctaagtcaccacgcggttctggaaaggcacttgcctctgcacttttctatattgttcagctgacaaagtagtattttagaaaagttctaaagttataaaaatgttttctgcagtaaaaaaaaagttctctgggccgggcgtggtggctcacacctgtaatcccagcaccttgggaggctgaggtgggaggatcatttgaggccaggagtttgagacctgcctgggcaacataatgaaacttcctttccagggagaaaaaaaaaaaaaaaaaaaa

SEQ ID NO: 167 - DNA, 1634 bp, Homo sapiens
taagatcaggtgggttgggcgggacatcctctgctaccatctcattaaaaggcccttcacctctggacaagtcatctgcaacaactgacttccaagatccttttgtgactcctccaaatgactttggttcccgtgttgtacctgacttccacatggccttctctcctggtccctggtgctgtttgggcctctgctcccatgctcatacctcttcttactccaattaccccaccatcacctctctcccctatcacccccagcctgcacacctctcatgcacggactggagggctgctccaaccagtcctcagttctctgccacccattgacctagagtcttgaacccaatttaatttattgggttctaggagaactgctgtgttctcaccctaacttggaagagtgatgtttcagtcaagcaaagcgattcctaccatacaatataacacttgtgtgaggctctgtcctaaatatctcaattaccaatatgtggtttggtagtatttctcgccatgctttgctcatgcgcaatgagactaccactagggtgtaaattttaagtatcccatctaaaactcatacaatgataggaaaaatccatttgtttttcatttgatttttactgaggaatcagctcaatcttcaatgaatactggtctctttccaaagcatttttgatcaaagtaaagactgagtcaagggctttttttttttctttttcttgttttaagagacagagccttgctctattgcacaggctggactacacgcattcacctagagtctagaacacaatttaatttatggggatctaggagaactgtcatgagtattgataatatgagagttctttatatttaaacattattctcaaccagagatagggatgtcatagaagaaaatccattcattcaatcattaattcattaattcacatgtccattatgtacctccatgagctggacataacagctaataagagataattgtctctggttttacagagctaattgacctaagagatgtagacaaatgaacaagcaattacatacatctaagctatactgggggaggaacagggctggataggtatgcagaggagataaaaaaattttaattccttagaatattttttaaaaattgattcttattttaccttctcatcttcttattttccaaattacagcatatatatatatttttttaagttttgaaggtagtcgagcttgggcaatttatccaacccatttaaaccaaaaataaaacttttcatgtattacctggtcatttcaaagcaaaaatattttgatcatgaaaaagaataccaatattcttttgttctaaaaatctcttatgggattacatgttatatttttggtttctctctactgatcaacagactacattttcacaactcttctttcctttacgttttaacacacagacccaagattcatactattaagattctagtagaactctagatggtatgcctctgtgtatctcagcatttttattcccactcttgtataatgaacatgttaacacctacctcacagggttgttgtgaggatcaagtaagatattgtgtgtgtgaagatgctctgtgaaatcataaagtcctttaaagatgt

SEQ ID NO: 168 - DNA, 2543 bp, Homo sapiens
gaattccgggcgccgggaccgctgggaccccgcactcggcgtccggcccgccgggtagccggcagtggaggtcccggatgaggcgacaatttttccggccccccctcccagtcccgccccacttccggggccgccactttcactttctcttccgccgaagccgctccccttgcgaagaactggggcctcccgggaggagagagggctttgccttgaaacccgggacgccaggggcgctcccgcaagtgggggtcctccgggacttggaacgccccggctgggtggtgtccgggcgtcctttccccgcttcttcccacctcggctggtcccgtttcctcctgcgcccagtgcggacctgtctcggcgcccgctgccctctcaccgccccacgcaggatcccggcctggtcatcgggcagtgtgatgcttcccgactgccgcggggacagcgaggcacacacagggcttgggccgcgccggaggccacacggcctggctgagttgctcctggtctcccgcctctcccaggcgacccggaggtagcatttcccaggaggcacggtcccccccagggggatgggcacagccacgccagatggacgagaagaccaagaaaggctgtgggtgagcgtggaggatgctcagatgcacaccgtcaccatctggctcacagtgcgccctgatatgacagtggcgtctctcaaggacatggtttttctggactatggcttcccaccagtcttgcagcagtgggtgattgggcagcggctggcacgagaccaggagaccctgcactcccatggggtgcggcagaatggggacagtgcctacctctatctgctgtcagcccgcaacacctccctcaaccctcaggagctgcagcgggagcggcagctgcggatgctggaagatctgggcttcaaggacctcacgctgcagccgcggggccctctggagccaggccccccaaagcccggggtcccccaggaacccggacgggggcagccagatgcagtgcctgagcccccaccggtgggctggcagtgccccgggtgcaccttcatcaacaagcccacgcggcctggctgtgagatgtgctgccgggcgcgccccgaggcctaccaggtccccgcctcataccagcccgacgaggaggagcgagcgcgcctggcgggcgaggaggaggcgctgcgtcagtaccagcagcggaagcagcagcagcaggaggggaactacctgcagcacgtccagctggaccagaggagcctggtgctgaacacggagcccgccgagtgccccgtgtgctactcggtgctggcgcccggcgaggccgtggtgctgcgtgagtgtctgcacaccttctgcagggagtgcctgcagggcaccatccgcaacagccaggaggcggaggtctcctgccccttcattgacaacacctactcgtgctcgggcaagctgctggagagggagatcaaggcgctcctgacccctgaggattaccagcgatttctagacctgggcatctccattgctgaaaaccgcagtgccttcagctaccattgcaagaccccagattgcaagggatggtgcttctttgaggatgatgtcaatgagttcacctgccctgtgtgtttccacgtcaactgcctgctctgcaaggccatccatgagcagatgaactgcaaggagtatcaggaggacctggccctgcgggctcagaacgatgtggctgcccggcagacgacagagatgctgaaggtgatgctgcagcagggcgaggccatgcgctgcccccagtgccagatcgtggtacagaagaaggacggctgcgactggatccgctgcaccgtctgccacaccgagatctgctgggtcaccaagggcccacgctggggccctgggggcccaggagacaccagcgggggctgccgctgcagggtaaatgggattccttgccacccaagctgtcagaactgccactgagctaaagatggtggggccacatgctgacccagccccacatccacattctgttagaatgtagctcagggagcttcgtggacggccttgcttgctgtagcgttgtaggggccctgcctgcactgcggttgtccacggtcacatctgccccagtgcctttgtccttcccttggggcttgccggccagacttctctcccctgcggctcccacctctgcctgaccccagccttaaacatagcccctggccagaggccttgctgggtggagcctctgtgtgactccatactcctcccaccacaacactcatctgtcaaacaccaagcactctcagcctccccgccttcagctgtcagctttctggggctaacttctctgcctttgtggttggaggcctgaggcctcttggaactcttgctaacctgttcagagccaggaaggagactgcacagttttgaaagcacagcccgtcaggtccggctctgcgtctccctctctgcagcctgtgtaagctattataattaaaatggttttcggccacgaaggccggccttcgtggcctcgag

SEQ ID NO: 169 - DNA, 3460 bp, Homo sapiens
aaagccctcagcctttgtgtccttctctgcgccggagtggctgcagctcacccctcagctccccttggggcccagctgggagccgagatagaagctcctgtcgccgctgggcttctcgcctcccgcagagggccacacagagaccgggatggccacctccatgggcctgctgctgctgctgctgctgctcctgacccagcccggggcggggacgggagctgacacggaggcggtggtctgcgtggggaccgcctgctacacggcccactcgggcaagctgagcgctgccgaggcccagaaccactgcaaccagaacgggggcaacctggccactgtgaagagcaaggaggaggcccagcacgtccagcgagtactggcccagctcctgaggcgggaggcagccctgacggcgaggatgagcaagttctggattgggctccagcgagagaagggcaagtgcctggaccctagtctgccgctgaagggcttcagctgggtgggcgggggggaggacacgccttactctaactggcacaaggagctccggaactcgtgcatctccaagcgctgtgtgtctctgctgctggacctgtcccagccgctccttcccaaccgcctgcccaagtggtctgagggcccctgtgggagcccaggctcccccggaagtaacattgagggcttcgtgtgcaagttcagcttcaaaggcatgtgccggcctctggccctggggggcccaggtcaggtgacctacaccacccccttccagaccaccagttcctccttggaggctgtgccctttgcctctgcggccaatgtagcctgtggggaaggtgacaaggacgagactcagagtcattatttcctgtgcaaggagaaggcccccgatgtgttcgactggggcagctcgggccccctctgtgtcagccccaagtatggctgcaacttcaacaatgggggctgccaccaggactgctttgaagggggggatggctccttcctctgcggctgccgaccaggattccggctgctggatgacctggtgacctgtgcctctcgaaacccttgcagctccagcccatgtcgtgggggggccacgtgcgtcctgggaccccatgggaaaaactacacgtgccgctgcccccaagggtaccagctggactcgagtcagctggactgtgtggacgtggatgaatgccaggactccccctgtgcccaggagtgtgtcaacacccctgggggcttccgctgcgaatgctgggttggctatgagccgggcggtcctggagagggggcctgtcaggatgtggatgagtgtgctctgggtcgctcgccttgcgcccagggctgcaccaacacagatggctcatttcactgctcctgtgaggagggctacgtcctggccggggaggacgggactcagtgccaggacgtggatgagtgtgtgggcccggggggccccctctgcgacagcttgtgcttcaacacacaagggtccttccactgtggctgcctgccaggctgggtgctggccccaaatggggtctcttgcaccatggggcctgtgtctctgggaccaccatctgggccccccgatgaggaggacaaaggagagaaagaagggagcaccgtgccccgcgctgcaacagccagtcccacaaggggccccgagggcacccccaaggctacacccaccacaagtagaccttcgctgtcatctgacgcccccatcacatctgccccactcaagatgctggcccccagtgggtcctcaggcgtctggagggagcccagcatccatcacgccacagctgcctctggcccccaggagcctgcaggtggggactcctccgtggccacacaaaacaacgatggcactgacgggcaaaagctgcttttattctacatcctaggcaccgtggtggccatcctactcctgctggccctggctctggggctactggtctatcgcaagcggagagcgaagagggaggagaagaaggagaagaagccccagaatgcggcagacagttactcctgggttccagagcgagctgagagcagggccatggagaaccagtacagtccgacacctgggacagactgctgaaagtgaggtggccctagagacactagagtcaccagccaccatcctcagagctttgaactccccattccaaaggggcacccacatttttttgaaagactggactggaatcttagcaaacaattgtaagtctcctccttaaaggccccttggaacatgcaggtattttctacgggtgtttgatgttcctgaagtggaagctgtgtgttggcgtgccacggtggggatttcgtgactctataatgattgttactccccctcccttttcaaattccaatgtgaccaattccggatcagggtgtgaggaggctggggctaaggggctcccctgaatatcttctctgctcacttccaccatctaagaggaaaaggtgagttgctcatgctgattaggattgaaatgatttgtttctcttcctaggatgaaaactaaatcaattaattattcaattaggtaagaagatctggttttttggtcaaagggaacatgttcggactggaaacatttctttacatttgcattcctccatttcgccagcacaagtcttgctaaatgtgatactgttgacatcctccagaatggccagaagtgcaattaacctcttaggtggcaaggaggcaggaagtgcctctttagttcttacatttctaatagccttgggtttatttgcaaaggaagcttgaaaaatatgagaaaagttgcttgaagtgcattacaggtgtttgtgaagtcacataatctacggggctagggcgagagaggccagggatttgttcacagatacttgaattaattcatccaaatgtactgaggttaccacacacttgactacggatgtgatcaacactaacaaggaaacaaattcaaggacaacctgtctttgagccagggcaggcctcagacaccctgcctgtggccccgcctccacttcatcctgcccggaatgccagtgctccgagctcagacagaggaagccctgcagaaagttccatcaggctgtttcctaaaggatgtgtgaacgggagatgatgcactgtgttttgaaagttgtcattttaaagcattttagcacagttcatagtccacagttgatgcagcatcctgagattttaaatcctgaagtgtgggtggcgcacacaccaagtagggagctagtcaggcagtttgcttaaggaacttttgttctctgtctcttttccttaaaattgggggtaaggagggaaggaagagggaaagagatgactaactaaaatcatttttacagcaaaaactgctcaaagccatttaaattatatcctcattttaaaagttacatttgcaaatatttctccctatgataatgcagtcgatagtgt

SEQ ID NO: 170 - DNA, 2588 bp, Homo sapiens
gctttctcctagggactgtgaggggcgcttctgactttggacttgagcactgcctgggacctgtgctgagagagcgctagcatgtctcagtggaatcaagtccaacagttagaaatcaagtttttggagcaggtggatcaattctatgatgacaactttcccatggaaattcggcatctgttggcccaatggattgaaaatcaagactgggaggcagcttctaacaatgaaaccatggcaacgattcttcttcaaaacttgttaatacaactggatgaacagttaggtcgtgtttccaaagagaaaaacctactcttgatacacaatctaaaaagaattaggaaggtccttcagggaaaatttcatggaaatccaatgcatgtagctgtggttatttcaaactgtttaagggaagagaggagaatattggctgcagccaacatgcctgtccaggggcctctagagaaatccttacaaagttcttcagtttcagaaagacagaggaatgtggagcacaaagtggctgccattaaaaacagtgtgcagatgacagaacaagataccaaatacttagaagatctgcaagacgaatttgactacaggtataaaacaattcagacaatggatcagagtgacaagaatagtgccatggtgaatcaggaagttttgacactgcaggaaatgcttaacagcctcgatttcaagagaaaggaggctctcagtaaaatgacccaaatcatccatgagacagacctgttaatgaacaccatgctcatagaagagctgcaagactggaagcggcggcagcaaatcgcctgcatcgggggtccactccacaatgggctcgaccagcttcagaactgctttacactattggcagaaagtcttttccaactgagaaggcaattggagaaactagaggagcaatctaccaaaatgacatatgaaggtgatcccattccaatgcaaagaactcacatgctagaaagagtcaccttcttgatctacaaccttttcaagaactcatttgtggttgagcgacagccatgtatgccaacccaccctcagaggccgttggtacttaaaaccctaattcagttcactgtaaaactaaggctactaataaaattgccagaactaaactatcaggtaaaggttaaggcatcaattgacaagaatgtttcaactctaagcaaccgaagatttgtactttgtggaactaatgtcaaagccatgtctattgaagaatcttccaatgggagtctctcagtagaatttcgacatttgcaaccaaaggaaatgaagtccagtgctggaggtaaaggaaatgagggctgtcacatggtgactgaagaacttcattccataacgtttgaaacacagatctgcctctatggcctgaccatagatttggagaccagctcattgcctgtggtgatgatttccaatgtcagtcagttacctaatgcttgggcatccatcatttggtacaacgtgtcaaccaacgattcccagaacttggttttctttaataatcctccacctgccacattgagtcaactactggaggtgatgagctggcagttttcatcgtacgttggtcgtggtcttaactcagatcaactccatatgctggcagagaagcttacagtccaatctagctacagtgatggtcacctcacctgggccaagttctgcaaggaacatttacctggtaaatcatttaccttttggacatggcttgaagcaatattggatctaattaagaaacacattcttcccctttggattgatgggtatgtcatgggctttgttagcaaagagaaggaacggctgttgctaaaggataaaatgcctggcacctttttattaagattcagtgaaagccatctcggaggaataactttcacctgggtggaccattctgaaagtggggaagtgagattccactctgtagaaccctacaataaaggccggttgtctgctctgccattcgctgacatcctgcgagactacaaagttattatggctgaaaacattcctgaaaaccctctgaagtacctatatcctgacattcccaaagacaaagccttcggtaaacactacagctctcagccttgcgaagtttcaagaccaacagaaaggggtgacaaaggttatgttccttctgtttttatccccatctcaacaatccgaagtgattcaacagagccacattctccatcagaccttcttcccatgtctccaagtgtgtatgcggtgttgagagaaaacctgagtcccacaacaattgaaactgcaatgaagtctccttattctgctgaatgacaggataaactctgacgcaccaagaaaggaagcaaatgaaaaagtttaaagactgttctttgcccaataaccacattttatttcttcagctttgtaaataccaggttctaggaaatgtttgacatctgaagctctcttcacactcccgtggcactcctcaattgggagtgttgtgactgaaatgcttgaaaccaaagcttcagataaacttgcaagataagacaactttaagaaaccagtgttaataacaatattaacag

SEQ ID NO: 171 - DNA, 1074 bp, Homo sapiens
ggggatggatatttcatgcatacccatagagaagtgtgtaagtgatatgtcagaagagcttcttactgatttcacctaaaatgagaaggaagtcctgttttcaagaatgacattagagtcatgcagctttgggaccatcagttttatactgtgataattgaaaatgaaacatgttcttattttccttaaattgaagaaaaccctttagttgtctacattggatggccttattacctctcagtcatcttttcataaatgatgtgcagaaattgtacttaaggacttaggagtatatgggaggttattggttttatgtttaaggatacgtttacttgagtttaagatacaggtcatccatcattcttaggctcactttttacagaaagtatgcaaatagtaaagtgacagcactgctaatgtttttccccagtactataacttgtggtttctgaactcattattgttgtatttccaaaaaagtaataccttttaattagtgtattgaaagttaagtataattattttaatgcaatctaatacaatcagattactcagttgccttacctcatgggaagagttacttttttagatctaaaaagctgaatagcatgttagttacttggtttcaacttgagttttcttttaatgttaataagattgaaactttagtatttagtggggaatggaaagagttgcccttgtcgcaagtaatgaagcctgatttgattatgaagctgcttaatcactcttcatgtgttcagaattactgttttttttgtttgtttttcctttttgtcactgtgtacattaaaattttggaagatgctttactatgtaaagtatagatggtcattttaatcattcagccacatacggttggctggtaaacagcttattctgatacaagaatgcttgggtgcatatggaaagattgtgaaagagtgtgtcttgcatcaacagctgtcttatttatgatatataagtagaaatagagcaaatgttggaatctgttatttttagtaccatgtctttaataaagctaagtattttagaggaaaaaaaaaaaaaaaaaaa

SEQ ID NO: 172 - DNA, 735 bp, Homo sapiens
gctgcccctgaaccccagaacaaccagctggatcagttctcacaggagctacaggccggagactgggaaacatggttccaaaactgttcacttcccaaatttgtctgcttcttctgttggggcttctggctgtggagggctcactccatgtcaaacctccacagtttacctgggctcaatggtttgaaacccagcacatcaatatgacctcccagcaatgcaccaatgcaatgcaggtcattaacaattatcaacggcgatgcaaaaaccaaaatactttccttcttacaacttttgctaacgtagttaatgtttgtggtaacccaaatatgacctgtcctagtaacaaaactcgcaaaaattgtcaccacagtggaagccaggtgcctttaatccactgtaacctcacaactccaagtccacagaatatttcaaactgcaggtatgcgcagacaccagcaaacatgttctatatagttgcatgtgacaacagagatcaacgacgagaccctccacagtatccggtggttccagttcacctggatagaatcatctaagctcctgtatcagcactcctcatcatcactcatctgccaagctcctcaatcatagccaagatcccatctctccatatactttgggtatcagcatctgtcctcatcagtctccataccccttcagctttcctgagctgaagtgccttgtgaaccctgcaataaactgctttgcaaattc

SEQ ID NO: 173 - DNA, 86574 bp, Homo sapiens
ctgggtgtggtggtgcgtgcctgtaattccagctactcagggggctgaggcaggagaatcgcttgaacccgggaggtggaggttgcagtgagccgagatcgtgccattacactctagcctgagcaataagagcaaaactctgtctcaaaaaaaaaaaagaaagaaagaaaagaaaaagaaaacctacattacgcagagcggagcaccagtgaaaagaaaaccaatgagctcagacccgcccccgccccccacccccccgccacagggtccccaaggtgaggggagcaggtggagaggacgacgggggtgcagtgagagccagcagcccggggcttatccttgagccttcttcgggaagtcgattctctgaggatggcagagaggagagtctcaggacaccacggccaccagcatagcggaggcctatgagtgccctacggaggggcatgtgcagagcccctcatcccctggtcatccctacaccttctgcccttccgttagagtctgtagatagggttttcgggggataaggggcaggtccacgccctacaatgcagggctccgggaggtaggggtttcagatgggagtgtgtgggggcagaggaacaaggggagaaaagaccctttccctccctcatcagagaagaagaagacttttggaaagacctgggaggggtgctggagaaagtctagatcctgctattaagtggaaggggaagtggtctgagcatcaaactttaccctgaggctgaagccccttctaagatcgttgtgaagcccattctaagattctaaagatcacctcgtgatctttcttatcgtccccagggctccagggcacccaccataacactcctaattccatcatcttaagcacttactgtgtgccaggcagatgttccatttcgaacccttgtgatacctttctagtggatggcgtgtggagtctttaaggagaactaggaattggttaagcagagatattgggggtggggggtggaggcactggaatatgcaaaggcctgggcacattggggcttgagggaccacctgccccagtagttttagctgggagaggagaggaatgagtctggagttaggctggagcctggctgaatgagagcgatatggactcgttttcttagccaccgtgaggcctggagggatgggatgtgtggggttagtcatattcaggaaaggcctcccaggagctggtgtggatgacaacccgcaggacggatggaggacaagaccaggtgggccactgttgaaattattcaggcaggagaggaggaaaatctgaatttaagcccaggctgtagggatggaggaggagaggcagttagagggaacttaaggaggtgaaatacattcctgacagatcggctgtggcaggccaaggagacaggaaggccaaggtgactccaggtttctgtcttccgtaaatggtggagacagagctcaggaggaggggccgctgtggagggaaaggaaccactggcttggaggggctcggggaacagctagggagaggtagggggtccaggaggcagctgggacacacggcctggtgcccagcgagcgaccgcagagtcctcggtgtgcagatggtaacagagcgctcgggagtaaggaaacccccactcagagtgcatgctggggaaggtggctgaggttggagaggcatctgggaggagccccagtcacagaggagaagcggtgggagcaagtggcacaggggttgggggagccgaggcagcattgtgggtggtaggtaatagcagaggccaggccaggcgcagtggcccacgcctgtaatcccagcactttgggaggccaaggcgggtggatcacctgaggtcaggggttcaagactagcctggccaacatggtgaaaccccgtctctactaaaaatacaaaaattagccgggcgtggtggtccacgcctgtaatcccagtgactcaggaggctgaggcaggagaatcacttgaatccgggaggcagattgcagtgagccaagactgcgctactgcattccagcctgggagacagagtgagactccgtctcagaaaaaacaaaaacaaaaaacaaatagcagaggccacagctgcagaaggaccccaggtgagggctggggacaggagtacactgagggctgtggctaggaggtcacagctgggagcaggtggccgaagggccaggagctgaaaggccagttacagaactcccaggactgcgtgttacaaagctctctggttcctggctgtgcagctccgagagagtggggcaccctgggcagtcgtcgccacactgtgggcatgtaagagggaaagctctccccttaacgtagagggcagagctcatgaggagcgagagatgcttttatttcaatcacctgggtcctggcctcatccggcaagagggcaatgtccgagatcaaaagcccagtcctactgcaagtctacccacttgctttgtctccttcttcactctcggcctccatcctcccctctttttctccctcccttcctcccacaaacccttattggtcctgttttggacactggtgattcatagatgaatgggacatggttcttgcccccaaatgtgcccatgctatggaatcttcagcaggaagaggtgagaagtgaagacgctgacagaggctggaattaaagtgacagctctagctggggagggtgctgccccagccttccagggaagtctttgaccagttttgaatcttaggtgatgcaaagaatcaaatggatgaagaaaagccataaaatcatagagatgggaggaagacggggagaatgcatcaggagaggtcaagttgatgtacaggacaatgagcaggcagaggaagggaggaaggcatgtcctggggcccgggctggagggagggtgcgggtgggtgaggggcttcagagtgctgcagcgcagaggagggaggagagggctgtggaaaggggaggttgccattcctttgtagttaatatttggaggcacgactgatttttgaatatagtttcatgcagatgctggtcagcctggagccacacttttctgctggctgtagatttttccccttttgatgcctttaggaaaatcaaattccaacatgtctgtgctggataaactgcagctagaggagccctcctttcctggggcactttcaaaggcagtggcatcttagcagcatcaggaaccagaggtagaccctcagggaggaggcagccctcaggcagctgctctgcctcacccctcacccaggattcaccttcctgagctctttttaactgtcgcaaggtagtctctttgctgttaactctggtgcagcgtccacacagacctgcttgcttttataaataaagttttattggaagatagtcatgcacattcaactatttattgtttatggctgcttttgtgctgtgacagcagaattcagcagttgtgacagagaccaactccctgcaaagcctaaactatttactatctggcgttttttagaaattatttttcagctgggtgcagtagctcacacctgcaatcccagcactttaggaggctgaagcaggtggatcacttgaggccagaagtttgagaccagcctgccaacatgttgaaacctcatctccactaaaaatacaaaaattagcggggcgtggtggcagatgtctgtaatcctagctactcaggaggctgaggtatgagaatggcttgaatccgggaggcagaggttgcagtgagctgagattgcaccactgcactccagcctaggtgacagagcgagactccaacttaaaaaaaaaaaatgaaagaaagaaaatgaaaagaaagcatttgccaatccctgctccagtgtactgggtagggtacaggttcagctgctgtaacaagcatcaaagaatcagctgctaaaacacaatagaaatttctttctccctgaaaaatctgaacagaagcagggtcagagatccaagctgttttgttgcttaactgttctccatagctggcctctccagccagctggaaggggagatgggaaatggaagatacaccttctgtctttcacgacacagcctgatagcatgtccatggcctcccctcccattctattggccagcaactggtcacatggccacagggagctgcaaggtaggctgggaaatgttctctttagctgggtggccatgagtccagccacaactcagggactttatcactaaaggagaaaggacagagtggatcgtaggggatattagcagtctctgctacaccttatcaagaagaataaagacagagtgcacaggggaaggatttggcattccctgcagagtattagaaaaaaatttgtaacatgctcaaatgaagtaggtatcaataacggatataaaatacctccttcttccacttcctccctcaaatatttattaagccctcatttatattaggctctatttggatgcattttgcagataaataacctgaagctcggagtgcttgagggagatgtctgagagttcatagccaaagagtgagagctctttctgccttattgccttgcttcccttgggacaccctggggctgggagctgggccttgcagcctgctaggctggctaggtttggtgacacagaaagcaaatgaataatttttaaagtgagaattctataaaggagactgcttgaacagattctgttagactgaaaaggcagaaggagacaccgaggtcaccagagatagaaacttcaggaagcagccatcacccctgcggctgtgggaacggaaggaagagagcggggttacgctagcctggaagcttggaggaggagacttagacctgcggggaggagctgggactcagaactgcagacctctgaggagggggtggggtgagactggctctgggaatgtgaaaaaaactaaaacctagaatcaactgctgctgggccaacatggcttccagggcagggcagttgggtcccgcctgcaaagagaaagaagcaagcccctccttcctctcccatccttccggcctccctccagcgccccctcctggccaagggcagcggaaatcagccagcaaagcagaacaaacagggttttgagtcccagctcgggcaccacaaagcagagggtagaagaaaggtttggagctgggagaaaatcatttaataaccagccccaaggctatgactcatttagacccccagtctgtgcagacctggggccactgcctctgagccagtgcacaccgggtactctggagcctctgtcttctgatacatgggtcagggggaatgcaaaatgattcaaccactttggaaaacagtttccttctttttgtttgtttgtttgtttgtttgtttgtttgtttgtttgtttttagaccgagtctcgctctgtcgcccagggtggggtgcagtgacgcgatctcagcttgctgaaatctctcctgggttcaagggattctcctgcctcagcctcccgagtaattgggattacaggtgcccaccaccatgcgtggctaatttttgtatttttaatagagatggggcttcaccatgttggccaggctggtctcgaactcctgacctcaggtgattcacccacctcggcctcccaaagtgctgggattacaggcgtgagccaccacacccgacctggaaaacagttttcctataaagttaaatatgcatctaccatatgacccagcaactctctcttagatatttacccaagagaaatgaaggcacatgctcactcaaacatttatgcttgatgtttgtagcccctttgttttaacagccccaaactggaaaacaaaaaaaaaaccctaatgtttatgaacttgtgcatggaaaacaacttatgttatatccatacaataaaatactacttgacaataaaaagaatgaataccgatgtacatatcaacactcatgaatttcaaaagcgttatactatgtgaaaaaaaacaggcacaaaagatcacatactctgtggttttgtccgaaatttcagaaatggcaaaatactgtgatagaaagtggatcagtcattgccagggcctgggggtaggggaaggagattggctgcaaagtgtcctgagggatcttttgagataatggaaatgtcctatataatgattgtggtgctggttacacaactgtccaaacccatggaattgtatactttcagttggtaagttttactgtgtgtgaattgcaccttgataaagctgattttttaaaaattgaagtagaacgctgttagaagtggtgcttcctccccttgtttctaatgccaccctcttgcaagcccatatccaagtagtggaccaaggcatcttataaaaacataaattcaatcatatcactccttgtttaaaacacttgaatggtttctctttcctctttgaatgaaatcctgagaatcaccatgacttacaagcctatctgtcctgctcactgaccctgacatttggagggcctagagcaatgggacagaggcccatgtaccacgattctaaatatgtacagttaggaatcaagccaatcaactgctaaaaagtaagttctatccttctttgataaatgtaccttcatgataaactggaaggccaggttcaaatgtagagtttggagttctgtcccagaatgtaaggttaacgaaaggcagacgctagactatagcctactgccattgcctttccacccccggatccatctgaaacctccaggctacctgccaggccgctgtagacatttgtgtccataacctctggggaccaaagacagcactggagatggaatcagagaaactggatgtgaaacatgtatctcttggttttccccaaattgtacttgattctgtatgtgtgtacatgtttgagcatgggtatgcatgcacgtgtatatttgcatgtgtgtgcatgcatgtatgtgcatttctatatgcctgtgtgtacatgcatgtgtgtgcaggtgtacatgtacatgtgtatatgtatgtgtctctgtgtacatgcctatgtgtgcatgtgtatatgtacatgtgtatgtgtatatgtgcctgcgtgtgcatgtgtatatatgcctgtgtgtgcatgcatgtgtatgtgtttatacatgtttgtgcatgtgtatgtgtgcctgcgtgtgcatgtgtatatgtgcctgtgttgtgcatgtgtgtttatttatgtacctcaacagcagtgtgagctacctgagggcagcagttgtgctgaattcatctcaatatcctttctacctggtgcagagtgatactagatgaatgcttgtggagtgaataaatgaatgaatgagggccagtacagcagttattaagtgtgggtcttgaagccagactgatgtgaggtccaaatcttactctgccggtcattaagcaagccgctttggtttattttcctaatcccgtaaagcctgggtttccttatctcccggtggggataagaataccactattttatgggggttggtgtgaggattaggtaacaacaatcagagccaacatggaccaagccaggctgtgggccaggcactgtactaagggctttgcaaatgctagctctcgtgctcctcctggcaatttcacggtgtaggggtggttacacagtcaactctcagagtgacttggctgttaccgtatttatgatggtggagaggagattcaggattcttagcccctgggggaagcttcccctgagtgcagctcagattctggctgatagggctgtctggagaggttgtctgagccagcaggctgcgcgctctgcctggccagctgcaacttgactctcgacttggccgggtccttctagtgcggcttatagcattcaacctcctctaggtggcgctgcggagcggggactcggctgctgatcgcggcgccccctggcggtctgttcccgtcaacatttagattaagcgcagagccggttccgccagggaagtgcgcgtcccggtgcccccgcgtgatgagagcggatgacagattgcgggaaaaagttagaatgtaacgttagttgtatgacagagaggaccaagctgtgcagcagagggagacagaaaagggagggaccaagccacagcaaggaatgatcgtcaataacattaacgtctagaatttattgaccacctgctatgcgcgagccactgtcctaaacatctggtattcattcccttagttaacacacctctagtaagtgcgtgtctcaagaacagtgtctgtgtttcatttagggcctagcacacagtgggtgtctggcacatagtaggttctcaacacatttggaaatgaataatacaataatcctgcaatttttctctccaattaataatgtagaggcaaatattatctccatttagaaaactgaacaatggtcggagagtttgcacaactaatgcgtgacacagcgagggcacacgaggtttagacccagctcagccgtgtgccagggcttctcagagaagagaagaccctctgccttcagggagtttgctgtctaattggccacgtctacaccctccctgcctgggtggcatgccagggatggctatttatggctcagggaggaggtccagtgaagttcccctcataaattataaagggagacacatgtgggtcaagattggggaattcagtgtgtgagggatccccaggaatcttacactgtccaatcagggattttccttctcttaccctggagagtggctgatgtaggcagtggggatttgctgagtacctataatgagctctcaagggtatctcctggtcctgtagaagaggctcacctcctccctatcacagagttccagttcctatggctggagctctcagccccagccgctggctgctcaaaggagagtttcctcatgtccaaaatgggggctatggtttatcttgtataccccagcacctgcatgaggaaggactgaaaagtgctgtgcacttttgtgattcgcacatccagtccccattcaggctctggggatcccccaggcatggtcttggtgtattagactttttcctggagatgtgattatgaatgggcattagtaagtggtgttatgcagagatgcccttctctgaatggcctctggtatttgttttttgagttcttgagaacatatatattttttggtattccatggtctttatcattgtcaggctgtcactgaactgtcgcttgcatttggctgcccctggtaattttcttccttcccctaactcactgcttcaagttcttgagttggcaggaagagaggaccaggctccttttatatttcttctgtgaataaaatatgccagtgtcaatgcatagactttgagctatcaattctaaccattcaatggcttttctctttttttggtttattcacaggctgtgggatgtggaggttatcaaaaatcaggtctccataagtgagaggtcacttcaggcatttctttgcacttatccaaaaaagattccatccatacttgtttaatggaacgtgtgaagagcttggctcctcttccaggtcatccctctgcctcattctccccctgcagcaggagcagcaagagcccggttctggagtgggagtagaaggtacaggcattgctgcagcggcaggacaggagcccattgctgacagagtgcctggcctcaaattacactgtatcagagctcgggcataaaattggcagcagcgttctgtgtatgaggagacagagaaatacctgtattcagcagaaccacgggcagggacagaagaaaaggagagaaagaggggaggaggggaagagctggcccgtcgcgggctcttccctggacatctttgtcccccaggtgcagaggtggcttcccagtggctgagtcagggccacaggaggtttcttggggggttgggggggccggggtttggagggcaagccatgaaaatacctgggaaggtaaacttgagggcttaacccacctgaaacacacacatacagatatacacactgaaaacgattaaaaaaggaataagaaatgtccatgtgtctaggcacttttatacagttttctattaattcctactacaactccattaggcaagactgtttcacagattggtgaagaagaaaggttcaaaaaggacatgttatcttgcctgagttcacctattataaatgtacttgtgtttatactcatttgtcaccgactgcaacctaaacatctaaacacattctctcacagccacaatgccaccactatacacattatatggtcttttatagacacaacacaaatgcacttacacttgcctatgcgagctgtatgtgtttatacacaaatatgtgtttccaactataggcatatactacacacacagtttacacaatcacctacaaattctgtatcatgcttgcttgctaaaattgttttgccacttcctgtccttcctgaccaactgtaggccaatgtcctcctcttccctcagttatggctgtgtgcttgcacctgttggtacttacagacacctgcactaataaccctgctctgtgtttcatttcatcctctagcctgggagccccgagacaccagcaactcatcagacttattgtttgtattatttctagttctttgggtgtgaattcttcatgatgtggaggctctgagctgtctttcacagctcacgatttgtagttttggtctgtgagttgacagagtaggccctgcagagtcactgactccaagctgtttttatataatgcctcagcttaggatttctgcaccacgtgggtagcttatatcggggccttacaccagtgcagagggcaggcttgaggctgatctggtacacacgtcccttgttccacccatggactgtgagaggacctcagctcctgccgtgactctaggctgatggctgagaaactctgttcccataatcagttctgacacccactttacactgagaactcagatttgactttctgctaacagcaggacctgtggcctgtacctagtcccagatttggcattaaaatctcagcccaacaatgcatatccaatcttggttttcccatgggctgttggccacgttcctctccccctggtatagattcctgacccctctctttgatcctacctaaaaattatgctttcttgttttttttagctgggacttgtatgtttaaagtagtttaaaacaactttctgctctgcatgtatgaatacgagtgtgtgagcgtgtgtagctggcagggagttactgggtgtggctgtgccaatgactcctgtggacctcttctcagagaagtcccttcagaatcaaatacccatacctgttaggagctgcagtcactgactggcagcgtttcattcattcactgaatattggttgagcacttgcaatgtgccaggcacgctgctagccaaggaggcagtcattaaacatacagataaacaaacaaatgtgagatgacaatagttatgagtgctctgcagtagacgtgcagggacctgtgagagaatgtagtagggagggccttaatttagggtgtgtggtcagggaaggcctcgctaaagatgtagcttctaagctgagatgcaaaggaggcagtgaagagctttttccagcagagggaacaccatgagcataggccttggggcggacgtcttagaacattctagaaacggaaaggaggccagtgagaaaaagggagctcaggagcagaggctggggaaggctgcagggcctcaggggcattggaggcaggcagggcaaggactctggactttatcctgagcacagggtgatggggcaggagagtttaagcagggagggtgaaactcactctgattggcagccctgtgaaagaggattggctgggcatggagatctaaggatgaggaaaggatatcccagagtgccagggcgcgcaaaccaaacttcacactctaggaagacagaggccagaggaaccaggagggcttcctggaggaggtggcatttactctgggcctaagagatcacaggaaaatggaggccagcattctaggcctggggaagagtttgggcaaaggcttggcagtaagagaataaaggtggggcttgatgggccagaggataagtgactcctcaaggtcacaagacaccctgatggctgggaccccatctctgatggagcaaggcttctgatacccaactgaggcttggcgccaaggactgacatcaaggaagtggattcctgcaaacctggcacccgagggtccacttcctcaatttctgtgcagctgggaggtgaggtaagaggaagtgtgggccacaggctaggcccagagagcctggaggaggagcctctgccagactggagagaagcaggcctgagcctccccaaaggcagctcctggggactcccaggaccacaggctgagacgagacgcagggtggctggaggaagtgagaggtgaactcagcctgggactggctgggcgagactctccacctgctccctgggaccatcgcccaccatggctgtggcccagcagctgcgggccgagaggtgagtgccggggtgtggccgcccccgggccttctcactgctcctcataggccttagggacaaaggccagtccttctgcagtccctgatcaacatgagaggctggggttgagtcagaacccaaatactcagaaatgcaacctctcagaactgctttaacgaaactttgagctgtggctcaccaccctcagacacaaatgagaacactgaggctccaagagtgggagtgacttgcccacggtcacacaacgagtgaccggcagtgtctggagaggaatgcaggtgtcctgggtcccaggctggggccctttgcttcacatggtgatcagcaatgactttccatcttctgcgcaaacagaattcacagaatctggcttgttcttccgctaatcagggcttgcctcaaatgtcacctcctccaagaagccttcctgacagcccctacctcattgctgtctgaccctttgccctatttcccttttctgcctggttcttatattacaggaataatattatatgctcatttattattttttcttgaacgttggctcccccatgagaagcaagctccacgaggctgtgtccgttttgatcgctgctgtatcactaggaggtagctcatccctattgagcaccaggaccaagggctcaataaatgttgctgaatgaatgaataaatgaatgaatgaatgggtggatctttgagacggaaaaggtcttagattcttctagtccaaccttgccattgtacagattggaaatctgaggcccagggaggataagagacttactcagggtcacagagagtgactggcaaggttggggcttggagcacggcctcaccagcatctagcctcgtcgcttgggaagcattttcagaatttttcctcagtagccaggtctgagctctaagctgcgggggccctgaggacgcaaagcctggcccctgcaccccctggattggaacagcaggtgacctctgttacctacgtggaggccactcagggggtcaccagagacaggccaggctggtgtgtgcctacgcggggaacagaaggcccatgttggggcctggggctggaagtagaacctgaagcgtgggttggggcaagggcagcagaagcaaatgcctacaggggagtccacgtggccttcctgagcctcagagcggggtgcaggagctgggtaaggctggccgacctgaattccttcctcccctcacatgctcctgggggacccagccgcacgcaaactcgaatcttccggaagcagcagctgtttgaggcttgggcacttcctgctttctggggtacagggttcaggggatgacacggagagctgaccagcaggactgtgcactccctcccccactccctgtcccctttcagctgccttagccctcagagggggagggactgcttttcatgaggccttgagccaggtactaggggcatgggggctccctgtacctcgaaggtcttatctgaaagcgagcctggattgttctgcttaaggtcaaagcagagagtacaaggagagggcgcaggttcgcgcagcggggactttctagaaccccaaggtgagacatccaaagatggggagggctgccttaggggtggcaagttcggttccaacagacatgttttgagcacctactatgtgccaggtgccagaaaacctgccctggctgccctccaagggttcttccaacctcggcctcccccagggcaggctccaaaacctcccccaggccaggctccaaagtctgtgaactgtgcgagtgtgtcttgagccagaacatcccggcccagtagggcctgggtgaggtccccaagggagcggatattccaggggacttccggttgggtttgctgctcttcttgcccgccccacaggcagccaggccattctcatgctgcccatcaaaaaactctataattgcagacgacggtagtggccgtgtattgagcagtactgagcacctactgtatgccgggctctgttctgggcactgggatgtagggtgagcagagtccttgccctcatggagattttagggctgtgtttgttacagatgggactgcatgaccacccggagacataagtacttctcctgtccccattttacagaggagggaaggagcggagcacagctaggaatcttcccaagggagcttgatcttcttgtccccagtgctgcgcctatgcctcgagcatctgccaatgtctgtcctgcttgactccttcctcagcccccaccaccccagggaaaactcgaggtccctctgcgaggcatcaaggcacctcgtgagcgggccctgcctgtctctccgactggtctctcatcacgttccacctcctgctctgtgctccagccatgctcagcaacctgcggttccctgaactgagcagctccatccagggcacatgttgactttgtttacatctgtgacccagggcctaggacagggcctggtatggagatgtttgatgccttattcccaggtgaatctgtgcaattgacagcaatgtgttagactataatttggctattgctatatggtcaccagcttcccattcctacactcaatatggccaccagcttcccattcctgcactcagtatggccgccagcttcccattcctgcactcaaggcctgggctgtgtcttgttatctccgtattcccagggtcagtggctggacctggcctgggaaggggtgctgagagacgaatgttggcttcacaacattagtttgctttgcactctacctcatacccggtgggcccacaaaacacatcagggtgataagcaggatctcttttcccctccttcgcacagtgactttgaacagcttccggatgatgttgccatctcggccaacattgctgacatcgaggagaagagaggcttcaccagccactttgtaagacagactcctagtccttcacccaacaacctctgaacttccacccagctgacctctgaaccttgccctctgacctctgaacctccaattctctgatctcttaacttctatctcagtggttctcaacaggaccgattttgcccatttgacattaccctgggagattctgattattgcatcttggggcaggtctactccacatctagtgggtagaatccagggtgctgctaaacaccccactgtgcacatgacagccctgtccccagtaaagaactgtccggccccagcataatactaagattgagaaatcctgatcgcgtcctttgacctcagaacctccacctggagagtcgggggtgagggactttagtgttgcccccacaacacccctgtcatattcagacacagatggagggggcatcctgcacccacagcacagccaggggcaggttcactctgcaccatgacctccaaggcatggctcctcatttcttgggcctgaatgtgtgtttggcctatttccaagggctcttgcctctaacactaggtctcacttcctctctttttccagttttttttttcttttcttttctttttttttcgcaaagctcgtctgcttctggggcgccagccttttgacttgacaggggtctccttctccagagacccttctgcatccttatcctcatcatcttcctcctcctcctcctccccttttcccttccacctctttttggcttgtgctcctggcccctgagccctccccacaacctctgtcctccttaggttttcgtcatcgaggtgaagacaaaaggaggatccaagtacctcatctaccgccgctaccgccagttccatgctttgcagagcaagctggaggagcgcttcgggccagacagcaagagcagtgccctggcctgtaccctgcccacactcccaggtaggcggccactcccgtcctgctgctgcagagctgctgactctccttccttccagggcccctgacactgttctgtgatttgatctcaaccccagtgaaaactgttcatgtagtttatagcccccactcccggcagttacaggctgccaagccctccctgcatggctccccctgcctcacgccatggcttccaccccaagcactctagcctcacagccccggagctctgatgaccatcgtggccactcgctcctgctgtccactaccaggaggccacagtctggagcacttcagcacctggcctcccttcctcagagacaggaatcccccagtctggtccctaaacacactgactcacctccctgcccaccctcagcttcctcccacgagaccagccctctgacttcatggtcttggcttccagcgtccctgtggctctccttcttctcctgtcccgccaggaagctgggtggcctcaagcctctgcttgcaaacagtctccccgccccctggcctcctggtccttcctccccagctggatcctaacgcgcaccttggacagcgccaagcccttagctgctcagcacctgccccgcaggaggaaaccccatcacgaatgggttacacgggggtggtctcagcggcgcccttcgtgccctgcaagttagagacagggacaattgtctcccttccccaagcctcagggacccttccccaagctccaaccccatctccagtttgttttttctgtctctgtttctgtctctctctgtctcagcatatgaccccgctccttctcatccagccccaccaaggaacttgaagctccccctaggagtcttgcctactctaagccagcctcccctctcaggctccatcattttccctcctctctcttttggggctctctcctgacaatctacccctccttttccttgtatattcatcttcctcttgatataccaactccctctgctaagcgtctccacagcctcaaccctcttctgtctttaaacaatcctgagccatgaaacagcattcttacaagcctccctgagcctccgtgcccccagggcccccaaagttctctttcttcttcctttggcatcaaattcacgcactgtctcaccttggcatggccatcctctccttaactcctcagcttggtttagctctgactactccactgaaattcctctcggtgaggtgggccatgacccatcaattctggcttccatggccagtgccaagcctcatcttcacacccccactccttcctctgttaagctttctccaacctcctgaggcaccagtgtctcccaatccccttcctagcttactagagactccttcagcttctctgttacagaatcaaccttctctgctgctccttggaaggtggggatcctctgagcagacatcctctctcccctgccttgtcttctcattccaaacactcaccctggcaaactgacccatgtctgggacttaattgtcacgtttttgctcctaactcccaatgtctagctctagcccagaccctcctaccgccgccgccatcacctctgtccatctcctggacaccaggagccaggcaggtttcagacttgcttcctcgtaggggttctcttggtgaatggttccaccagtgcgcccacatgaaggcacctggaggggacatttgtctcttggtagcccgtcatatttccttttcctccagaacatctgccttgagcttgaggaattgttcattcatccacttaacaaatgctcattcatctgggcatgattctagacccatggttcttaactttggtggtatgtggacgtgccttgagagatggaaagaatcctggttcctgagtcctgcccccggagattctgatttaattgctctggggcaagtgctacacagtgagatatttacaagctccttgggtagcttgaatgtgcagccggtgttgccactgtcctgggtgatgggggtacagctgtgagccaagcaggtgaaaatcctgctctcttagaactaagagtcgtgtgtgtgtgtgtgtgtgtgtgtgtgtgtgtgcgcttggatgaacaggcagtaaataaaaaagtaagacaagaaaaatatcagctggtgatagcacaactgagaggatgaaagttggatggtgccagagtggccacttcagtgctgtgaaaagataacagggaagaatgctgagccatcgggaaggggctctggccagggttcctggcctgtaggggcagccctgagccccggggccatgttgggccaggctcctaggacagctctttgtctcttctcagccaaagtctacgtgggtgtgaaacaggagatcgccgagatgcggatacctgccctcaacgcctacatgaaggtaccagtgggccttgccaccttggcacgtggaagggcatgcagtattggtgggggagcccacgtaccatccctgggtatggctttgggaactggggctggctctctggctctgatggccccatcttcaatccctaaaggcctggtctggggagtaaaacaggatgcgtccttagggttccagagataggagcaggagcaacggagaaggtaaaagagccacactaggaattgacaagtcttcatttaatgctccaagccccacaggtgaatgtctatgccaggagttaaaatacaaaggtgaattccatccagtgtctgcccccaaggtacccactgtcctatgggaatgccaacaggtggatcataagatcacacggagacatatgtgtgcctccatcatgggggtgtggccaagcaggccgcaggttgctcatatagcatctttgtgcaaactagagtaggcctcctctgggacaactcactcccttacgtgaacatgggctggattttagctacactcatgggtcttggctgggggcccttgtgtattctccgacttgcaaactctgcatctctatgagatgggagcgtagaggaaggagcatcttaaaggcagaggccaaggtggtcaggaaaggacttccaccagccacagccatccaggaaaggggcagtgttcctcatgaggtggcagtgagtgcaccgtcgctagagacctgatagtgacctcaggaagctggcaagcgaagccctcctcccagcccagcggcatcctcacagctggagagcgctgggctaggatcctttagtcttgactctgacactgactggctgggtgatttggggtgagttgcccatcctctctaggccttggttttcacacttgtgaaatggggcagtgccctctagtatcacaggagtgaagttgggatctgtcgagaacaggatgagaaagtgctttgtaaactgtgaacctgcttccagaatgtgagagatcttgactcctgatggagggaaggagcagatggagggcagaggaggtgggaggaaggaggagagagcaggtagctgcaggaatcctgggctctgagcagggaagagggagggaggggagctgggtgggctccagctgctccttcagggtggctgaggctccacccttctccccctgggctagaataggggagtgggctgtgaagggagggagggagggaaggaggaagagaaggcaggaggcgaggctggggaactggggctcctcattccacacctggtcttagcaaccagcagcccagaggatccatctctgcctctttgtgtccaattgggttcctggaagccagagatcattcagggcaggaatctctgccatggccaccccatcctgtgcttgcataccctcagagatggggagctcactaccactccgccctgacccaggctgcctgtcccattgttgggcagctatgagaaaagcccaactctctgtaagtcctacccactggtctcaccccgccctcatgaagaatgtgaatcacatgataatgacaactgcctggaactgcgtgaagagctttgactggcaaccaggagactcttgatacacgtttattgataaatgaataatcttatttaatcccctcaataacttgtgagttaagtgtgacagagcagttaggtaggtgggatgagatttgaattcacatctctgtgactccagggtttgagctcttacccactgtgcctcgttgtaatgaaaatcacagtaacaatgatgacatctaactttgatgggcacctggtatatgcctggtgttgttctaaggattctgcatgtatttactcatttaattctcacacaatcccacgagggagaggctattattgtccccattttattaatgaccatctggagccaggtttgcccaaagccacccagctggtgacaggcagagctgggattcgatcccaggagcccctggctccttaaacacctcccaggctgtccccatatgacagccttttccgggctctgcatccccagttcctctcggacaaagttccccgaccccacctcatcctgctgcccccatgggatcctctgcagggctctgggtgcctctggagcctcagcacccaaagccaaccctcagtgtccccagacctgtgcgcttggagtttggtgagatgaccccgccaggctctgggtgctcgcgtcctcacagcttcaaagtctttgcatcgtggtgggtgtaaccagcttggatgaaacaaggacactagggctcaagtccgggccctgtcacttagctcggctcctctgggccaggtactttccctctccaagcatcagtttcctcaactatgatatgagataaagtatcaggaagcattttgtaggctataatgccaccaactgttgttaatttgggttattttgggagccccccacccccgccaactgttgtctcaccttaagctttgggtagcctttagtggcagatggctctgggtgccccagctctgtcccttgctaggctttgtggccttgagcatatcccttcacctctctgatcctaactcaagggatgtcatgagatggagcaagggcgcgcatgtgatacccacctggtaaagtcaccgccgggtcatgttagttgtcatcaccattactgctgtttctggagaactttaagtcttttccaaatggactcttctcaagcccctggtccctctcctgaccttggacccaggagcagagcttgtgaagtgttaccttcagcatgctgagttttcttattcttttaaacaacgcatttctgttatcaggcatcatgcattagtaaagagaggagggctgatgtcagggctcggggacgggacatctaggctggggtgtccagatctttctgctgactaccccaccggttctgctgtctcacccacacagagcctgctcagcctgccggtctgggtgctgatggatgaggacgtccggatcttcttttaccagtcgccctatgactcagagcaggtgccccaggcactccgccggctccgcccgcgcacccggaaagtgtaagtgaccagcccctgggcttccacatggccagagccctgggtccctgctggaaaagcatctcttttccctgaaaggagagaaggaaaatacagatcagccatatccctggacactccaggatgatttgatttattagatgggtttagaaagtcatgttcaggcttggagggacagagggtgtgtgcctttcaatgtgataataaggattggaagacgaggactgggatattgactccagagagtttggtgccacagcaactactggggatagcccagaagctctgggtgcctggaaagaattgggggcagagaggagggaaaagctgccccatccacaaacattctctgagcatctctgggaatgccttctccctggtgtgttggagctccatggggccagctatggctctagttgtatcatgctggcctccagagcacactgttcctcccttattccaaaaagcccatccttcccaccaaaaattcaagccactcgtagactgctgggcttccaaagcccaggttgctgctactaagaattctgggaaaagcaggacggagctcctgagctccccaccagctcctccctctgcttcctcccaccaatgtctccaagggtcctctccatgcctggcatctcccctgtgcacacaggcaggtgtgtcttaattccagctgtgccatgtggcagccgcaggccccagagcaaggcacttcacctctccaaccttcagtttccctcagctgaaaaattagaaacagtcacatttacatcagagcttggttgtagggagcagaggaacaaacacatctgaacactttggcaagtgaaaggcaccgaatgagcgtgtatccccttccccacctgctttctgagcctggcttcctggtccataaagaagggagaacaatcccacctccaaagaggttgtgaggatttggggacaagtgtgcccgcccagaggagcaattgcagccacatttcagcatcttctgtctcctctgccttccctgctccttgcaaggggctcctctggacacaggagcaggaagctgggccctgagagaatcacagggctaacaagcccctcttctctctccacagcaagagcgtgtccccacagggcaacagcgttgaccgcatggcagctccgagagcagaggtaacccccgcccccacgctggccaggctctcacactgtgggcatctgccttggcccacctgccagccactgggcctctcctgctgggtgctgctgtgtgcctgggacagtgctgggcaccaggaggaaggaaggggttacagcctcagcctctgccactgggggtcccccgagcccagctaaggggagggcatgtgaccagcgtgcggagccagaggagaatgcttccatccctacgctcatccggacagtttacctgggcctcctctgagtcagccctgccttaggcatggaagctgcagagatgactcagacaaggcccagcccacgatgaagcctggggaccagggtgggtgctcagcccagagagttcgaacccttccctgtgtgctcacccccaccaggtttggaaggagcacccatcctggagtcagggagacctgggttcaattcccagctcctccactaaaaaatggggtggcctcagagaagtcgcttattctccccaagcctcagtttctacatctgtaaaatgggagactaaagtatgtaaggcacttctataggaactcagtgagtgttctctccttccctccttactgcacgcttctcctcaggctctatttgacttcactggaaacagcaaactggagctgaatttcaaagctggagatgtgatcttcctcctcagtcggatcaacaaagactggctggaggtgagttcagaagtgaggatggaggtgagattgaaggtgaggttggagggaaattaaaagtgaagatagaggtgagggtggaagtgcaattggaggtgaggatgaaggtgagggtggaggtgagattggaggtgaggatggaggtaagagtggaggtgaggatggaggtgagattggaggtgaggatgaaggtgagattggaggtgagggtggaggtaagagtggagatgagattggaggtgaggatggaggtgagattggaggtaaggttggaggtgagattggaggtgaggttggaggtgagattggagatgagattggaggtgaggatggaggtgagggtggagatgagggtgaaggtgaggatggagattgagggtggagatgagggtgaaggtgaggatggaggtaagggtggacgtgaggatgggggtgagactggcagtaaggttggaggtgaggatggaggtgagattggaggtgagggtggaggtgagactggaggtgaggatggaggtgagattggaggtgagattggaggtgagggtggaggtaagggtggaggcgagagtggaggtgaggatggaggtgagactggaggtgagattggaggtgaggatggaggtgagattggaggtaaggttggaggtgaggatggaggtgagattggaggtgaggatggaggtgagcgtggaggtgagattggaggtaagattagaggtgaagatagaaatgagaatggaagtgggattggaggtgagtttagaggtaaagatggaggtgaggatagaggtgaggaaggtgagtttgcaggtaaggatggaggtaagattagaggtgaggatgggggtgagtttggagttgaggatgaaggtgaggttggaagtgaggttagagatgaggttggagatgaggttgggaataaggatggaggtgaggttggaggtgaggatggaggtgagaatgcaggtaaggttaggctgagattagaggtgaggctggaggtgaggttgcttcaggcattgtatgcttcagagactgaggatggtctcagaaggcctcagggaagagatgctatctgaggatagccctggagatccaggcaggttggggagcctgcgggaacaaagcctttggggaggcaggtgttcggtggcagcagaacattcttggagctcatgctttggttctgaccctgaaaaatgggttgcttagggcaagtaagttaacctactgagtttagtttcttggtctgtaatgggtgtctcagcaggggcactattgacattggggccagatggtcccttgtggggttgtcctgagcattgcaggctgttcagcaatatccctggcctctccactagatgccagcagcactgctaaattgcaccaatcacatggctctccagatatttgctcctgaggggtgaaatcgcaaccacttgtgtaatatgggacaacagtacataccttgcccacagcagtaaaagctgctgatgaagagtgtgaactcagagtcagcctgtttgggccatttcctagctctgtttttcactagctttgtggacctttggaaacttgctcaaacttgcggtttccttttctgtaaatgtttcttcatcggcttcctggaaagggtaaaggaggtggtagatggccagggctcgccccagagcctgggtgtgcggcgcctggccaggtactagggtcattaggagacttaaatgaaacttcaaagccagggactttcccagtcactgctttgtccctgtgtggcccacagaagggctgtgttctgactcagtgagtggaggtgggaagtggctgtgttgggccttggcctgggaccagccttttgtattaggtcctgtcttcagacttagtgctcctgtggggagtgttgaaggaggttctgggacaggcccagaggcagggtcagcccccaggggtcccaggacctttaagagttgggttgggtccctagcgtccaggccctggagaggagctagtagtgaccactggtttagccagtttagcagtttccattttaccctaatcatagatctccatctcaggaactcagggctcttacagaggcctgaggagtatctctgggccactttccagaaatagaaaacatgtattgccttcctgttttccggaaagtcctacttatcagtatgctggctaacttctggcctcaggttgaaggtgggggcagaggggcagggaggggaccactttgagccttggttaatatgtttgtaaaatggcatgtaaataatccatgttccatagggtcgttgtgaagatgaacagaacacgtgcccaaagcccaggccatggccgggtctgggtctgatttctggctacttggtctagagtagaggcacagttgtatctgatgaatgaatgagtgagtgagcgggatcagcagcaggcccttcctcacccctcatcctcttcctcccctgttctattttcctctgtaacacctgctgccatctgactcactggataggtcattgttcacagcgcgcacagcgtgtcattccccatcatactggaaactccgtgggggcaaggacttattattatttttttattattattttttctttgagacagagtttcactctggttgcccaggctggagtgcaatggcgtgatctcggctcactgcaacctccacctgccaggttcaagtgattctcctgcttccgcctcccgagtagctgggattacaggcccgcaccaacacgcttggctaatttgtatatgtttagtagagacagggtttcaccaagttggccaggctggtctcgaactactgatctcaagtgattcaccagcttcggcctcccaaagtgctaggattacaggtgtgagctactgcgcccggcccaaggacttttatctattttgagagcccagagcctgtcacgtggctggttctcaagaagcctttgttgaatgaataagtgaatgagtgagataaaagcagctttctatataaatccagattctggcatattgtaaaacccaaatataagccttcttagaagtgaccagctcagcgaacttcctcgctttccctcctccctctacagaagaagacccggacctcatctgcctttccccatcactagaacggggctgagggctctgaggcgtggctctgctgcctctcctctcaccagcatggcatcccttctcttcctctgcagggcactgtccggggagccacgggcatcttccctctctccttcgtgaagatcctcaaagacttccctgaggaggacgaccccaccaactggctgcgttgctactactacgaagacaccatcagcaccatcaagtctgtggcctgggagggaggggcctgtccagccttcctgccatccctacgaccactgcccctcacatcaccttctcatgggtccctctcccactccaaagcccccagtggctcccagatgagccacaatgctgtaacaagccatcaacgtccagggtggcctggccagcctcattcccctttcccccaccccacaccccacttccagcctgatgcctccttactccagcctgtcacccccttagggacatcgcggtggaggaagatctcagcagcactcccctattgaaagacctgctggagctcacaaggtgaggggctgggaatggggctggggagttagatactctggagaagagagcgcagggagaaatgttaagcactagtattaaggtgctggggttttgcgtgtactttgtcttctctttttatccgcagcccagccctgcaggttaggcagcatctccccactttagagatgagcggggaagctgcagagaggttaggggaactggttgagctcacgcaggttgtgggtttagatccggatctgcagctggagctaaagtctctctggctaaaagccttggacttgaaccatccactctcagggactcactacccccccaggtccaggacattgctggacagttattttacagaatggtaaccgcattgctacatttctgactataaaacttgtaccaactcattatatattaaaaaagaaatgtcagtaaccatgtcagaaagatacaaagaagtgaaatcacctcatatttttactcccctcgttatgtgacgtacactcagatttcttcagtacttacaccccacacacacatgcacacacaaaagtcactttggctgcacaaaacctttcagtggctacatcattaacatggccatgcgcttttgctggcctcttaggatttcttctgcttttttactactctaaacaacattgtacagaccatcttagttaacctatttgatgacttatctgatcatttcctttgaatgattttcaagaagtggatttggggattaaagcatttgcaagtctcataggcttctggcccacactgtgaaattactggtagaaagctcagatcaatttctacgtacaccagccaagtagaaggatgcgcatcttcccgcacccaggccagacagttcctgtccttacaaggttctcctcaatagcctcacacaggtgtctctctgaggctttatacagccccactctgtgcccagtcaaacccactcttcttcacaactcttaatcctttagcacatttatacacgagacatttcaggctgtgccactaatttccgtgaaagtctcttctccttctcctttttttttttgagatggagtctcactctgttgcccaggctggagtgcagtggtgcaatctcagctcactgcaacctctgcctactgtgttcaagtgattctcctgcctcagcctcctgagtggctgggatcacaggtgcatactacctcgcccagctaatttttgtatttttagtagagacagggtttcaccatgttggccaggctggtcttgaactcctaacctcaggtaatctgcctgcctcggcctcccaaaatgctggaattataagcgtgagccaccgcacccagcctcttctcccttttaggcctcgatatccccatctgtacaatgggaggttagattacttggatgacacgggcttgtatcaggctctgactttttcttactcctggcttcaggacataaaacccttttcaccccctctccctacccctaccttacgcttaggccctttgattatccctgacttttcccatgcaggcgggagttccagagagaggacatagctctgaattaccgggacgctgagggggatctggttcggctgctgtcggatgaggacgtagcgctcatggtgcggcaggctcgtggcctcccctcccagaagcgcctcttcccctggaagctgcacatcacgcagaaggacaactacagggtctacaacacgatgccatgagctgacggtgtccctggagcagtgaggggacaccagcaaaaaccttcagctctcagaggagattgggaccaggaaaacctgggaggatgggcagacttcctgtctttgaggctaatggacccgtggggcttgtaatctgtctctttctactatttacatctgatttaaataaaccattccatctgaaaggggcaggctgcgggaaagagtgtctttcatggggagtaaaataccatttaatgagcatccacagggcgtcatttatatctggcaggggccctggctctgagacccctgtcctgccaccccatttccttgctctgtccctgtgttggggggaaacccgagggtccccaagccataccctttctccctcccactgctccccttttcctgggattggccacctgccccacagaagtgatctgctctgggtgccctctggggttccaccaatgccaagtcctcggctgtgtgatgagggtcagaagctctcctctgccttcctgtctctgctgctctgtggaggaggaaggcaggtctcggggttggttgtctccactgtaagtagacacagggggaggactctagtctcatccaggaggagggggacacaaagcaacgggatctccttctctgagctgaatctccttctatcctaatctaccaaaaattaaacaggtgtgactcccacaatggtggtgtgaggagcttggtggaccctctccccagggaaacagcagtttaactgatgagaaatacttaaaatcaactgtttaaagtctctggaaattgttctaagggcacagagcacatggagagacagtcgttcaagtagatcattacgtctcagtaagaacagtgagtcggtggcattggagacacatcgtgttcccgtccccccacccccagctccatgtgatggaaattccactccagatcctccactctggatggatgcagccaggaagatgggctccctcatccctcagctcctaaccttccacagtttcaccccaggaggaacaggctgccagaatctcttctctctgcagccctgtgttgtagaagcactattccaggtcattacagcagagaggactgagtttcctgcagttcccatacaaagtaccaggaaattgagcttaagcaacagaaatcgattgtctcacagttctgaatgctaggtgtccacagggccatgctccctgtgaaatatgtagggaaatccttccttgccttttcttagcttctggtggtttgccggcaatgtttggtgctccttagcttgttgatggatcactctgtcttcacatggcattctacctgtgtgtatttacagtgtcttccctctgtgcatgtctgtctctgcatccaaattcccccttgtataaggacacaagtcatattggactagggcccatcctagtgatcttcttttaccttgattacctctataaacctcctctttccaaataaggtcacattctggagtactaggggttaggacttcaacatgtcatttttaattccaacataacacttcaacccatgacactccctttacccactcagctccccctcctagggcaagggctctgcaataggcgtagcaggctaagaatgctgaaccttaaccctctggtagagcaggggttccatgctgagaggggcaatctgagatcaagggataccgtcctccactccagtgcccactcacagaacaggacatcactcctggagaagcaggctgatttccccatccccagctctgatgcagtggtgcagaggttctgcccagggagagagtcaggccttagggatggagaattccacagcttttcctgaggggactaactttatttgggaagcatgccgaagaagttggcaaaaataatggaaatcttggtggccggcaattaaggaggggctagatactaatgccatcaagagaaatgtaaggccagaaatttaacagagaaccagataaagaaataacgaagaatagtggttctaggactacagtcatccctgaggactcaaaagattgtgctctcgtgccaggctgcacccacacagcagaaatcagagtggaaagtgtggcagacttgaaatcattccctaaaccacatacagatccatcagcaaaacacgctagctcaagaggctgaagcataacctctgaccaagcaatggctgaacaataagctaatctgacacagaggggattcttaggaaggcaggcttaaaaataaaattacactcatttcctggtggtctggaagactgcgtgcacgcccaggccgatcactctcaggagtgactggagaaagaaacgctgggctatcagtttctgactgaacatggggcaagtttgaaccctgtactgtaaaagatgtcttcaaaccacattcacggccaaaagtaaggggtgaaaccaatctaattgagggggcttcagcacaacttttcaccaataggtggtttatgcagacccaggtgcaacctctaggaaaccaggataagagagaaaaaaaaaaaaaaaaacacaagaggaaaaaatacgagcgggggcatcataagctacacattgtaggggaaacggccctcacaaaattagttcagtgaagccactaaacaagtaaacagataacaaaccaaataacaaaaacattaagccctagagggaataggagagcagcatctagagttgcttcaaaatataatctaaaatgttcagttcctgatatggtttggatctgtgtccctgcccaaatctaatgtctaattataatccccaggttgaaagtggacccttatgggaggtggttggatcatgggggtggattctcataaatagtttagtgccattccctccgtgctgttcttgcgatggtgagtgagatctggccatttaaaagtatgtggcacctcctctttctctctctcttcccctgctcttgccatttaaaacttgcccgcttccccttcatcttccaccatcattgtaaggtttcctgaggcctcctcagaagcagaagccactaggcttcttgtatagcctgtagaaccaagagctaactaaacctcttttccttataaattatgcagtctcaggtgtttttttgtttttttgtttgttttttgttgttgttgttgttgttgttgttgttttgagactgagtcttgctcttgttgtccaggctggagtgcagtggcatgatctcggctcactgcaacctctgcctcccaggttcaagtgattcccctgcctcagcctcctgcgtagctgggattacaggcacccccaaccttgcccagctaatttttgtactttcagtagagatggggttttgccatgctggccaggctagtcgcgaactcctgacctcaggtgatccacctgcctcggcttcccagagtgctgagattacagtcatgaaccactgcacccagctggtatttctttatagcagtgcaagaacaggcaaatatagttcccaacaaaaaattataagaattgcaaagacacagcaaagtgtaatccatacacaggaggcaaataaaagcaggcaaaggaaactaaaaaaattgcctttgagggaaggattcagatgctggacttagcaaacaatgactttatattaggaatatgtttaaataactaaaggaaaccatgtttaaagaattaaaagaaagtattgtaacaatgactcttcaaatagagaatatcaatacaaagacataaataattttttaaaagagaaccaaattgaaattctagagttgaaaagaacaataactgaaatgaaaagtccactagaaaggctcagcagtagatttgagttggcaaaagaatgttagcagagaaagtataagcaaactgagagatagatcaatagagatgatgcaatcttaagaaagaaataaagaaaaaggagtgaagaaaaatgagcagagcatcagagaaatgtgggacccatgaagtgtaccaacatatgcataatgagattaccagaaagagaggagagaaggagacagaaaaaggatgaaaagaaataatgattggaaactttccaatttttattttttaaaaaaccaccaatctacatatccaaaaagctcaacaaactccaagtagtaaaatacaaagaaagccacacttaaacacatcatagtcaaaatgttgaaagccagacataaagagaaaatcttgaaagcagaaagagaaaaatgactcaccgcataaaagggaactacattaagactaacagctgatttcctgtcaaccaagaatcttacataaaacaaatctaccactcaaaaatgaaggtgaaattaaaacattccaaaataagcaaaaactgagaatattcattgttaagcagacttgccattacaaaaaaatattaaaggaagttcactctaatggcttcattttaacttgattagctctgtaaagactctatttttttttttttttttttgagatggcgtttcactcttgttacccagactggagtgcaatggtgtgatctcagctcactgcaacctctgcctcctgggttccagcaattcccctgcctcagcctcctgagtagctgggattacaggcgtgcaccaccacgcctggttaattttgtatttttagtagagatggggtttctccatgttggtcaggctggtcttcaactcccgacctcaggtgatccacatgccccagcctcccaaagtgctgggattataggtgtgagccactgcacccagctaagactctatctcatgtaagatcactgcattctgagatactggggttagaaattcaacatatcttttgggggagaatacaatttgaaccacaacagtacactagaaaatatccatttaagaaaaattttaaaagaccttgcaaggtgtgatctcccaaacccagttatttggcttctagtttgttgcctgaccacattcaccaagaaaattttctgccacaaaacaaccagacctcagctaggacacaggctttgaggaattatgagcctcacaagaagcaaaggagttctccaatgattcttccactccccaccaaaaaaactatgataggagctgaaaccagaatacagagcagttggggtgttgttttctggagtgcagaggcagtccagaaggcagagccatggggaggccatgagatagggaggctgcgccaggggcttccgtgccaggccaaggccctagatgtgagagctgaggtgatctggagagagtggcattcctggcttcaagcagaagcggaagagggtctcctctggagtaaagtatttccagtttaggctggcaggagttaccctgattaatatcaagcaaaaggctcatagtcaaagatcaccaaatctctgtgagtgagaatgagcagaggcaataaacaatagctttagagccccagggactaccgattaccgaattatgtgactgaaatatttaaagaaataaagaatgtaaccataaagataaacaagcaaaaaagaatgagatggcaaattttcagatgtgtaaaagaaagaaggtatgaacgcatctatgtgtgtgcgtgtgtgtgtgtgtatacacacatatatattattcaatgggtgagttggtaaaaagtccaaatttatcaataattctgataccataaacatagatggattccatgcatgagttaaaagactgtcagggccgggcacagcggctcatgcctgtaaccccagcactttgggaggtagaggctggcagatcacgaggtcaggagtttgagaccagcctggccaatatggtgaaatgccgtctctactaaaaacactaaaaaattagccgggcgtggtggtgcacacctgtaatcccagctactcaggaggctgaggcaggggaatcgcttgaactcgggaggcggaggttacagtgagccgagatcgcaccactgcactccaacctaagcgagagagtgagactccgtcaaaaaaaaaaaaaaaaagactgtcagattgaatttttaaaaatctaaatctatgtaagtgtcatatgtacaagagacacacataaggtaaaacgtcatggaaacattgaaattaaaaaaaaagtatgaaaaaagatattcctggaaaccactaaccagaagacagctgggacgtctatacagattcacaatctacttttgtgtaaacttggtactcaaactcacttggtagcactccttgaccctgagctgaatagttaacgcttaccagccatatgtgtctctgctattcccttattttttgatgcttttggggggatgaattttgattttatgtacagctcaagtaagaacccgtcaaaatcagaagtgaaaagcttttgctgataatgaagctgatgaaaattgcatgggtggatttgttaagtaacggtatctgatgaaaaccttggctctgatcaattggcagtgggcttcagtctgctctgcagaatggctgatgaggacccaccaattgcttacaccctgttgactgttcttggcgtaccatgtgctacaggaacacaccagatacatttgacagtaactggaaaaagcctacatccaccatctttgtaggatgtatccaatttaccgtctgtcagtacacatactagacaccatgagtaaccagagaaatattttctgactgattaataacatttttataccagcggtacaaactcattgcagggattctagcttggaaaaaacaattgttagatgttatcattcctaggaaactgctatgcatactccctccctaaacatcttgtggaaaagcagtttcagcttttatttccccttgggggatatgtgcattttagcctaagtgcaaagaagtttagaggaagggtaaacactttttttcaggctgtgctcttgctaccatcacagaacctaagattccatggctcccgaaagagtccagtgttaagaatgtcatgtacacaattgacagtgtttggaatgatgctgattatacattaacacatttgacacagattctgactatactgatgcttgcaaacaagtctgtacataaaggttttggagaatttttgtgacttatgagaaaatgatgatgtaagacttcattcttgcacaaaaagtttatcagctaaaagtggaaataactgagaaaaactgataccaaagaaatgtcaaacaccgtgattcagctattgttcattctttgcatagtggggaagttgctaacaaatacagataagggttactgtgatgataatgactacacaattaacacagagtaaaacattcccattaaaaatatggtgaatatttaattagttaattatgggccttgagcaattctcaattaatggtgagcaggagataatggaaaattacccaattagaaacaggcttctcaagtaggcatctcatggaataggatgctggaagaagtcattaaaaaggcaattgattgcagtgtgcttcttggtttggggaccctgttcctggtacatcatgagatgtccaggagggaatatctggcatcctcaagttaagataattcaaggtgtgtttaataaagggactgtttacaaagacgtagacaacacacaggaaaacctcaaggaatagttcaatatcccagggataggacctcagacctgttacattcctgagcccaaaggaataaagggaaggagtgtctacaaaacctggaaggaggggattgtgtagacatggcctccttagaaggactggtgatctttgactggtgggcgagattgacccaaagtaaccccgctgggaggcgatcagaggaacaaataccccgccctcctctccttccccattctgatctcaggggaggggttccctactgccaaacaaaactggaagccctagggccaggctgttgtaatccacacaggttagcttcccaaggtagacagcagggcggaagagagcacagtgtagatgtgagtggggaaaaatgaagatatctggcatcctccacccgttttgcccctcattatatacgcttatccttcagccaagtgaaaactccatgttcccaagacagggaacacaggaattcccatcagctattttggcattttaggatcatatccatacagacatactcccacctgaaacccaaagtgtgagctgctacgggtattctttatataaagcagtggaggcatgatgaatgaagtaatatacgcatggctgttagagcccctgcatccgcagctggtcacaggtccaaagctgatattttgagctacctgttcccagtgttcatttcatgttcctctttcctctgccagtacatgggtcaaataagggtctttatgtggtggagcaactcaagacttcattcctatgggatctgagttctcgttagacttgtctttatcagattgcctcagtattccattgaccaggactattgggtaagaaaatactgagaggcacctatgtgaatcacggtgggaccacacatagtcctgtctacctcctttcttttttcttttcttttcttttttttttcttttttttttttttttttttttttttttttgagatggagttttgctcttgttgcccaggcttgagtgcagtggcacaatttcagctcactgcaatctctgcctcccgggttcaagtgattcttctgcctcagcctcccaagtagctgggattacagacacccagcaccaagtccagctaattttttttttgttgtatttttagtggaaacggggtttcaccatgttggccaggctggtcttgaactcctgacctcagatgatccacctttctccacctctttctccacctattggctcagtggcacaaggagggtcaaatggttcaaatttctaaaaaatatcactttgtatatgccacaagttttcatatgccctattgtcatttgattgtaactactatttaaattcaattaggatattatctgagctatcagttacttagaagtgtgttttaaaatttttaaacatgtgaggattttattttttgtttgtttgtttttgggggtttttttgagttggagtcttgctctgtcgcctaggctggagtgcagtggcacaatctcggctcactgcaacttctgcctcccgcgttcaagcgattctcctgcctcagcctcccaagtagctgggattatagggatgcactaccacacccagctaatttttgtattttcagtggagatggggtttcaccatgttggtcaggctggtcttgaactcctgacctcaagtgatccacccacctcggcctcccaaactgctgggattacagttgtgaaccaccatgcttggccatgtgaggactttaaaaaaacacttttttttctttttctttttaaagtatccttgcacgttttgtgcagattcatttgtctttcatgtccttcagttttagagacctagacaagctaagggagtgaatcaaaatcaacagataacaagggtgaggtttctcaaactgaagcatcctgtttacgtctggtaaaaccacctccacagaacatcatgcgtcgtcaggtataaggcctaacacctgtggtgtgtagtgatacagcattttatctcttccttgtagcccatgaaataaagagaaagtttgttcaagagatgatggtagttttcactgcactagagtgttacaagaaagtaagtgagaacaataaccccaggacagggaggctgctgctcactgctccagcatctgcagcattctcctgaggggacacattaaggcagcagagagacatttcccaaaataaacagcgagggaaataaaggtgtaggagtcacagtgaggaggctaaagtgactccatcttggaagctaatccaccatgttgacttctgattaaccccggttctgggaatgccgctaagatttccattttatctattgttctttgtgtgagaacatatgcctaccataaatcctgcctttagatcaaattaagcgtgctaccctttctttatggtgtataatccctgggtctgggggataatagtgtagagatctacctgtctcacagctgcccaagaccatccttcagtccctaagttcccaaataaaaccatcctataacaagctggattcgtctgcttccttctttggtatcctggctcctatgtttgcaggtcactttgcatatacaggcttaaaaaaacacttttaatagtcaaatataacaatacagaaagtacataaaagaaaaatagctgaaaattaacaagctaaacttccaaaatcagaagtaaaaaaacaaaaacaaacaaacaatagaattagctcaaggagagaagtaaagacataaagataaggccagaactcaagatcaccacaaccaacaacaaaaaatacaatagaaaaggtcaacaaagccaaaattgggttcttaggaaagactatggtaaaactgatgaagataaaaagaaagaagaaaaaatagtattaggaatgtaaatgaaccataattatagatgaaacagaggtttaaaatacactgagaatttcgtcaaaagctttatattctaaattttaaaatttaggttaaacaaatacttagaatagtataatttggtttaaaaaatcaagagaatagagagactgaattttcctttaactattaaatacattgaagttgaaatgttgcctccccaggcacatacagttttatgggcaagttctaccaaacgttagaacagcagattatgctaacattacaaaaaaatcttccagaaaatagaagatagactatttcccaactcatctatgcagccagaataatcttcttgcctgtcttagtctgttttgtgcttctatagcagaataccaccgattggataatttataaagaaaataaatttatttcacacaggtctggaggctgggcagtccaaggtcaaggcaccggtagatcagggtccagtttctctgtttccaacatggcatcttgagcgccgcatcctccagaggggaggaacactatgtcttcacatggcagaagagcagaaaaggaaaagagtaaatccattcctgcaaagcctttttataacagtattaatccattaaacacctcccaaaaacttccacattccaacactgtgacattggaaattgagtttccaacacattaattttaggggacacattcagaccacagcaattcccaaatatgcaaaagcagtacaagtagtaaaaattataaatcaatcacatatatgaagatagagactttagcaaactaaattcagcaggaaacacacatacacacaaagacaatataaatgcctacattaggtttaacccagacatacaaggaaagatttgcatctaaacatgtataagtactattcatgccgggcgcggtggctcacgtctgtaatcccagcactttgggaggccgaggcgggtgaaccacgacgtcaggagatcgacctcgttcggcgggtggaccacgaggtcaggagatcgacctggctaacacggtgaaaccttgtctttactaaaaacacaaaaaattagccgggcgtggcagcagtcgcctgtagtcccagctactcgggaggctgaggcaggaaaatggcgtcaacccgggaggcggagcttgcagtgagccgagatcgcgccactgcactccagcctgagcgacggagcgagactccgcctcaaaaaaaaaaaaattattcaccaccacataaaagaataaaggagaaaaactatatgatcaactcaacagatgcggggaaaataatttgatacaattcaagacctattcatgaatttaaattaaacgcacgtgcacatacccacacacctcttagtatactgggaataaaagcgatgcctttcatttaataaaggctgtcttcaagaaaatctgcagcaaacatcattctaacatttagtaggagcacatttgaatatagcagcagttcctttacatggtagaaaggcaagaatgtccactatcgctcatctaccaacactggaggccccagccacgcagcatggcattaaaaagaaataaaagcctaagaattggaaggcaaaagcatatctgtcattattcacatttgctataatcgtctacattgaaaacccaatagaatgtataggcaaatcattcactgtgataagagtgcgtcactgtgtggctgattatgctaacattaaaagttgattgcctttctagacgacagcaataaataatttgaaaagaattcttaaaagagatgccatttacaacatcaataaaaccttaacgtacttggaaataaatctaaccaaaggtaggcaacacctgtatgtagaaaatggtaaaacttaactgaaagattaaagaaaactgaaataaatggagagacaacccatgttcatgaataggaggctaatattgcacagctgccagttctcccaactgatctatagctatccataggtttgatgcaaatagaaaaaaatcccaataatttatttcttctttttgttttattttgtttttgtatatattttcataaactttttctaacatttatatagaagagcaaaggacttgaaatagccaagttactcctgaagatgtataaagtgatgggagatgacctctagaatagcaagaattattataaagcaatggaaatgaaaacaatgtaatattgtcctagggactgatcatttatctatggaacagaatagagagcccagaaatacttgatatgtgatagaagtagatttggccgggcacagtggcgcacgcctgtaaacccagcaatttgggaggctaaggcgggcagatcataaggtgaagagtttgagaccagcctgaccaacatggtgaaaccccttctctactaaaaatacaaaaattagtcaggtgtggtggcatgtacctgtaatccctgctactcaagaggctgaggcaggagaatcgcttgaatccgggaggcggaggttgcagtgagccaaaatcacaccactgcactccagcctgggtgacagagtgagagtctgtctcaaaaaaaaaaaaaaaaaaaaaaaaaaggtagatttgcagattagttgggggaagagaaatcaaatcacataatggtgcttgggcaattgctaggccatatggaacacaaaacaaatgagattggatccctaacttaaaccattccaaaaggcaacttatgcattaaactgtaagacagaaaagtaatactttgagaagatatataggatgctatctaccaaatcttgggatagagaacaatttcataaagaaaacaaaaataaataaatattaataaatttgattacattaagctcaagatgttctcatcatcaaaagtcacaagagaagaggcacagtggctcagcctgtaatcccaacacttgagaaggcccaggtaggaggattgcttgaagccagaagtttgcaactaacctggggaacaaagctagaccttgtctctataaaagaaatgttaaaattagctgatgtgcctatagtcccagctactcaggaagctgaggcaagggatcacttgagcccaggagttcgaggtggcagtgagctacaactgcaccactgctttctagcctgggtgacagaggccctgttaaaaacagaacagaacaaaacaaaacaaaaaacaaaaagaagacacaaggaagagaaaagataagccaaagactagaagatatttgcaagatgtgtaactgacaaaagattagtatctagaatacataaagaattcccacatattaataagaaaaataaggacaactatataaaaaacgggcaaagccatgattagatattccagtaaagaggaaaaaaaatggtcaataactatataaaaagatactcagtagtaataagaggagtgcaaactggttcaatctctggaagacagtttgcaatttttttgtagagttgaacattcccatatcttatgactcagcaatgaaacttgcacatgaccctgggacataagcaagaacattcatgacagctctcttcctaatagcccccaacaaatgtaagcaacccaaacatctgtccagagaagagtaggttcatacagtgattatagcacaatgacaacatgaatgattcttagaaatgtaattgaatgaaaaatcaactatcagaagataagattctatttttttaaagctcaagtactataaacagaaatagcagatacaaaattcaagatagtggttatttttgggagggaggtagcaaaggcataggagaggaagacataggtaagtatcagtaacaggtactgaaatttgttggaatacttggggttgagtgggtgggggagtgggttcacagctgtttattatactttatggcttacatataggttacacataatcttttgcatgtatcaaatatgacattaaaggtaacatatagtttacaagcttaaaaatcggtttccataaaagattcttattctccagttttcagagctttgacttcatttggcataaattaattactttgatctgttatgccaggagagcattgctggccacgtggtaggagtggggttttcctgaaagacagggtgggatgaggctgtggtgagcctccccttggagaggaaatggtgaggcaggagtccaagcctagcattgctggctggagggacctggagctctcttcccaggctgaaaactttgggactttccacctttgaagttctggttaatattctgtttccctgcaaacaagtgcagggaataaccttacaataaccatgggctggaggtttgtccttagggggaaagaggaatgggacaaaggacagggaggacaggttcagctgagcatgggagtgggggtggagagcagggagttcatgctgaaaaagaaaggcagacaaccactcacttagaggctgttaggaagatgctgaaagaaagcaggggaggccatgaggccctggaggtaaaaacatggtttctggctctgctacctccttgctggataacttgggtaagagactgtcttcccatctgtaaaatggtctaataataatggcagcactcctcgtaatagctctcaacaaatgtaaacaacccaaacacctgtccagagaacagtaggtttatacagtgattatagcacaatgatgacacggatgattcttagaaacatgattgaatgaaaaagtcaagtatcaggagataagattccttatcttcatacctcccttcgttgcatggtttttgcgacaataggaaatatattttgtacattgcctgccacacagcacccatcaataacacagacttaaaaaaataagaccacctaaaaagaagctttaccaagaaactaagcaatttgaaatggcgactatggcatagtaaaggccagctggaatctggaggaaacatggagacctccagcatactctcctgttcccgccatgccactataacaatttcttcaaggaataaaactgtccctagaaacagtaaaccatccagcaactgtgtatgagacatgcttatggctgttaaatagactttcacaagctgcattctcttcctgcagtgctatgagaagtcatcatcaagtttcctgcagagcaggatggacttgttcacacatttgacatttcaataatgtacacttcggcccaaataactcaagttgggatggttggtgatttgggcctagggattgtgcccctcctgcttgaaaagcggaacccttgagcagcaacattaactcttgctgattctaacattttacaactttcaaaactgggtaattagaatcttagagtgcccatgactgaatcatagaacctctaaagatcagtgtgtgtgtgtgtgtgtgtgtgtgttgtgtgtgtgtgtgtgtctgtgtgttggaagaaggggttgggtcaaagaataccaaagcaacaaaagtactatgggatgaatgagttcaaagtcttgcaaaagggacaagatgtttctgaagcctgaagtacagagacccagagatggctcaccagtgatgctacatgcctgtttgattaaacttttttttacatgtattggccctttgcatttcttcctttatgaactattgttaattagtatgttcatatttttcttacttagttataatatctcttgctattcaggataccaactctgtattttgcatacgtttttgcaaacttttgccctcagattgtcattttttgtctgttttatgaggtggttggcctatctttgcattgcatgactatacagtttagctcttggagtgagggcctgtcttctaaattctgggaggatgtcactcaatggctgtcaaagtgctcataaacagagaaaactagggaattccctgataaatgtggccacaagaattcatctttttattagataacccagtcccttcccaactcactctcagcccatttccttattttacgcccatataaaaaaaacctgccaatgccagttattaagctattatctctcagctccaaactcatccctctgtactttgttgtgatactggatttgggacttcccaaccacagtgatgtcagctggttcctggtaccctctgccaacttgggtgctagagggaagctgtgagctgtgaggttggaggaagagaggacttgcaccttcctgcctacttgctgctccagtgagcctcactgtaggaatacttcttcacccttcaccctagcagcagcaattatttcctgtggcagcatttaaatccattttgcagcttctccagccctggcagaaccagttttgatgagaaactccccttttcccctggcccccacacaagacaccagcaccagctgatactgtgtgggtgtttgtcccctccaaatctcatgtggaaatgtgattcccagtgttggaggtggggcctggtgggaagtgagtggatcgtggggccagatccctcatgagtggcctagcaccaactccttggtgataagtgagttcttattcagttcacacgagagcaggttgtttaagagtctgggacctctcccttctctctctttctctcactccttctctccccatgtaatgggtctgcttctactttgccttctgccatgagcaaaagctccctgaggccttcccagaagctgagcagattctggcactacatttcctgtgcagcctgcagaaccatgagccaattaaacctcttttcttcataaattacccagtttaaggtatttctttatagaaacacaagaatggactaacacaaaaaattggtaccaaagagtagggcattgctataaagatatctgaagatgtggaagtggttttagaaatgggtaacgggcagagggtgaaagaatctggagggctcagaggaagacaggaatatgagggaaagtttggaatttcttagagactggttaaatgtttgtgaccaaaatgctgatagagatatgaatagtgaagtccatgctgacagaattttcagacgaaaatgaggacgttcttgagaactggagtaaagatcacccctgtttatccctagcacaaaactgaactgcattgatgcatgacctagggatctgcggaagtttgaatttaagagtgatgacccagggtatctagcagaagaaatttctaagtggcaaagcattcaagacaggacctggctgcttctaatagtctatgctcagatacaggagcaaagaaatgacctaaagttggaattatatttaaaagggaagcagagtgtaaaagtttgaaaagtttgtaacctggctatgtgacagagaaagaaatagcattttcaggagagtaatatgtttaaaagagtcttgtggagtaaccacttgctaaagagattagcgtgactaaaagggaatcagtgctactatccaagacaatgaggaaaaggtcttgaaggcactgaaggccttgaagtcgttttcaagattttctttgaaggcaaatcttcacagctgctcccatcacaggcccaaaggcctaggaagaaccaatgctttcaggggccaggctggggtaccactgccttgtgtagtctcaggatgctgttccctgcatccctgctgctctggttccagtctcaggttaaagagctccagatacagtcaggctgccactccagtgggtgtaagcagtgagcctcggcagttttcatgtggtattaagcctgcaggtgcacagaatgcaagaatgaaggaggcttgtcatctcccacctagtttccagaggatatatgggaaagcctaggtgttcaggcagaagcctgctgcaggaggggagccctcacagggaaactctactaggacagtgccaaggggaaatgtggggttggaacccccacacagagtccccaccagggcactgcctagtggagctgtggaaagggagccactgccctctagaatcaagaatggtagagtcagccaggcgcggtggctcacacctgtaatcccagcactttgggaggctgaggctggccaatcacgaggtcaggagatggagaccatcctagccaacatggtgaaaccacatctctactaaaaatacaaaaattggctaggtgtggtggcatgtgcctgtaatcccagccacttgggaggctgaggaatgagaatcgcttgaacccaggaggtggaggttgcagtgagccgagattgcaccactgcactccagcctggcaacagagtgagactccatctcaaaaagaaagaaagaaggaaagaaagaaagaagaaagaaagaaagagagagagaggaaggaaggaaggaaggaaggaaggaaggaaggaaggaaggaaggaaggaaggaaggaaggaagaaagagagaaagaaagaaagaaagagaaagaaagaaagaaggaaagaaagaaagaaagaaggaaagagaaagaaagaaagaaaaagaaagaaaggaaggaagggaaagaatggtagaatcactggcagcttgcaacctcaatgtagaatagctgcaggaactcaactccaacccatgagagcagtcacaaggctgtacccttcaaagccacaggagtggagatgcccaaggccttgggatgcaggatatgcatcccctcacaccaggatgcagggcatggagtcaaagagattgttttggacctttaagatttagtgactgccctgccagatttcaaacttgtttggggctgattgctcctttcttttggctgatttctcttttttggaatgggaatatttacccaatggctgtaccaccattgtatcttaggagtaaataacttgtttttaatctcacaggcttataggcagaaggacctcatctccagatgagactttggacttgggatttggagcttgggacttttgagttaaggatggaatgagttaagactttgggggactattgcaaaagtatgattgtattttaaaatgcaagacggacacgagaattggggtgccaggagaggaatgatagagcttgaatgtttatctccttcaactctcatgttgaaatgtgattcccagtgttgaaggtggggcctaatggaaagcatttgatcacgggggggtgggggaaccctcatggtttagcaccatccccatggtgatgagtgagttctcactcagttagttcaacaaccacatgagatctggttgtttaaaagagtctaggacctcgtgtagaaaagctgcaggaactcaactccaacccaagagagcagccacagggctgcacccttcaaacctacaagagtggagctgcccaaggccttgggatgcagggcatgcatcccctaacaccaggatgcagggcaaggagtcaaagagattgttttggagctttaagatttagtgactgccctatcgggtttcaaacttgtttggggctgattgctccctctcttgccatgtgacatgcctgctcccgctttgccttcctccatgagtaaaagctccctgaggctcctcagaagctaagtggacgtggcaccatgcctcctatgcagcctgcagaaccatgagcaaattaaacctcttttctttataaattacctagtttcaggtatttctttatagcagcacaagaacagactgacacacacaccagtagaacagtgaccccttctcagagatcgcaggttcatcttcctcctcttggtttctcagtttttataattttaacctcttcccttttgcaaggggtgaaagctgcttcctgcagttgttaccaccatgataccttacagttctctctttctttctggctcactctcttaatcttttagttacctagttaacaactctatacttaattaacaaatcatgttaagttctctctggtcagataattggtgtgatttctgtctatggactggaccctgactgatacaataaatataaattgatcatatttattacagtcattttctgggacttagaagttctgtatttcagacctcgttttaccactattatataaagtaatcaaggaaacagtcccctggactgccctctctctaactctattcccatcctcttgggttacaaagttctacctgctagaatgctcttatttccaggaaataataacagcatttttttcatttatatatgctatttataatagcattttcagagtttatgtgtcacatagatccttatttggattttcttatttaatcctcataacaataccatgaagtaaatactattgttagtattatccccatttcatggccaaagacattaatacccaaagagatgaaaagacttgcccaggaacacacagccataggtggcagggccagaaatcagctccaagtaggctaaccccagggccggtgttcttcacctattggttgctgctggtgtggaaagaaactagctctgaattccagctctgccactaatgaggtgaatgaccaagaggtcgaggtattggctggatggctcttgggagatggcaacctgaggaagtggagggagggagaccaagagctgggtgctgacgtcatcaggataggtgggcgctgaccagatcattggtagatgccagcaacacagaatgagctgcaaatgagctggggtttctagaaggcaggaatgaaggagaaaatcagcctccaatggagagaactgcaaggaagcagtgtgctcagggaggacaggtttgagttggcacaagagggtggcatgagtgtcctagggctgccagaacaaagtaccacatggatggcttcgtcctggaggctggaagtctgagaccaaggtggctccagaatggttccttccaagggctatgagggaaggacctgttccaggtccctcttcttgcttgcacaaagcgtgttcatgttgacatggtgctctctctgaatgtgcgtctgtctcaaaatttctcctttctacaaggacaccagccatattggatttgggatcattctaatgaccccatttcagtttgattatctctgtaaagaccctgtcttcaaatcaggtcatattctgaggtattggggttaggacttcaacatatggatttttaggtaacacaattcaacccctaacaggaatgaagagaacagtcagagaaaaagagcaggggattttgctagaccatgagttcccacaggtacagggaagagcttggaaaggctgagagatcagacagtagatgctattaagaggacttacatatggaggacttggggatgaagttgggtcttaagggatgtcctgggagcctgggtttctggcagtgactagggagagctagaaagttgatgtgctgtgcctgaccacgatggtcaccttggggaaggtggtgaccagttccagctggcctggggccaccagacagctggcctttcttccactcttggtaatttggtgccaagtgggcagtaaaggcctcctcagggcccactcccttaggcagcattgagagtgggggttcatcctcatggaaataaagggacaggagctctcctccagggccatgaaagcacagttctgcacacagtaagggcatgggacacagttctggaacctttctgactcccctcaatcaatcagattttctacctctgtcaagtttcctcttgtagttagcaagaaaacaaagatcctaagaacgtggaaggccctcctggctggtgtgaggcgccctgatgcaggggagcaggaacccttgaggctgcaggggcagggcccttgagaagaggcaggcaatgtggggaatttttggcacccataggagggccagctgcactgtaggctgccccatgggctgggctggatggaaggagcggttgagggtcaagtccctggggcagctcccagatgagagggaccttgatggccctggatccagggttgacaatcccacaccgtctgaatccagtcagctctcctcatctgccaccccaccaaacctcaactcctccctgccctgccaaataagtctatctggtgtgagtggccctatgtgtccagttagctccccacccccatgccagtcaccccgggacacatacttaccacttcctctgtcatactatcaaactatcactaaggaaactatcaacttgaaggaatcaagtgatgcaacaaacagtctggataaaaccatagtctagagagaagcagggtctcagggtgaccacaggggacatgtgtttgaaagtagggacagagtctgaacaatccatgtatcctggacaggtccctgccagtggcagtgaggtggggatccccaggacaggaacaggcatcatgtgcgtccctcccatttctctgccagctcccagggctgtacagggccccagcccagcctgccctctctgggcccagtacactacactcacgtctcctggctcttccactggcaccactgcccttagagtgtcctcgttcagatgcaactttgtgcccaagccacactcacagggtctgtctgtccaggtccctcccgggatgcctcccacagagccctgcattctcacctagggcagagcctccaaccccacagaaagaacagcgttctcagggaaaacctgcctggttcctgccccctggtgctcctgacccccagactggctcagatctatcccctgggacctgccctgacctgactcaagagggacttgcaggaggaaacttgctgtttcccagtgctctgtaattctcgtaattctccgttctcattctggtgccagctttgtttccgacagcaggggcccacttaacatctgacagctgaattcctacattccttcccatggcctagaaagctcaaggtggagactgccttgcccttcccaatccctgttcccctcctacctttgcacctggggcccagctccctgttgacagccagcccctcagaacaaccctgcttttcccatcactgtaatcagcctgcgggggggacacccctctctttgggcagcttctacctgccaacagtaatggcctgaagtccctcagccctgaagcctcctacctggagatcttgagaaagagccccatctctaagaagggagcattgtttcttatgaaggggttttcctgcaacttctcactcgagagcagttgctgtatctgcctctgcggtagatcagacgctgatggctcttatcttcctcatgactccaaaccacacagttcggttcctggtatctgctttaccaccttggcctgcccctgaaaaccagaacatggtgtcgggaagcagaggtttgggctccctgctttcggctcaggttgctcctgctggtgagatgtgtgttgggcacttttctggctttggaagagctaaaggttcaggacaaagtcactgagatggtgcagggatgacagagaggtgaagcagacaaagaaggccttcacgaaggggaacagaatacacagcatattagcgagtacagcagagtgctgtcagctgcaagcaactgaaaaaccactgaaagtagccaaggaacagggggtttgtcattgctcagacacagagtctggagacacaatagtaccatgcagggacgtgtagggtctcaacctcatcaagaacccaggtgcttcccctctttgcgctctgacagttcagaattggagtgatgatggccgaggggactccaggtatcacatgcaaagggcgatgcccagaggtagaaacaacatcttcctttgtctcattggccaggttgagatcacatgatccttcgtaagccaatcacaggaaagaagaaaattactgtgagtagcttcaactaatcaagttccaccttcttgggacaggggacaggaaggtattttatatccaagatctgatttttccaagttctttggttcttgaaggtttatatccttgtattttatatccaagatttgattttttccaagatctttgttccttggaggtctatatctattgttggttgtttctgctgactctcgcccatggtggcttgtttccttgggagtctggtgattgttaatatgggttcctacatgggaacatgtggctatgtggaaagtcagtgtggttcaatgaaaagaaatggtgttttctacgatcaaccagaaccttgtgcctgagtgacatctgggatccagctgcttcattgctcctccattgactggccaaattggtatttgtactaagtcacgtggttgcacgtccatattgtcatgtctgttccccgttagctcagccacctggaggggaatatgggaagcaggagccaggggcaggcagacgaacttgttctctctcctacgccctgccttctaccctccactgccttctaccagctctgccaggaaccccaccccttcccagttcctgagatttcattatatagaggaagtcagtggcaggagggcaagatctttgcctttcataaacagaaaggagactgttgatgtatccaggggctacagtgagaaacagagatgtgagtttcagagtgagtgtgtggatgaaattctctatgggagacacagcttgagatgagccgagagcatgtatggggtcttggaaacaccaccacttgagggatgggcaaagaaaggaaatgacaacagagagtgccaaagatccaacagaatgagtttgtccaacccttggcctgtgggccacctgcagcacaggatgactttaaatgcagccctacacaaattcataaaaacattatgagtttttttgcgatttttttttttgttcattggctatcgttagtgttagtgtattttatgtgtggcccaagacaattcttctttttccaatgtggcccagggaagccaaaagattggacacccctgcactagagaaagggaagaaaacaggcaagtgttgtgtcctggaggccaaggcacaaacaggtgtccagaagtgaaggctccacaatgccaaattctgctgcaacagaataggaggtagctctagaactgggcaaaaggaaggtccctgtggacaaagcagcgtttgcggagcaggtttcactgggttggggaataagtgagaggaaagaaatgctgacagtgagtgcagctgggccctttaggaacgctgagtacatcctctgcctgagcaggtgtaccctgacaatcccagttaatgttggaatctgccctcccatcacccatctagtcccctaatggctccacttctttgttccattgcactgacactcaccttccaaagtgtcatttgccttgtattctttactaatgtagtatgttcattgtggattgtgtatctcccctgcaagactataacagtctcaaaggcctcattttttctggtcaccactatgtcctaagtgcccagagcaagggcttggctcccagtaggtgtttagaagggttagtagaatgaagtgaatgacagaatggggagaaggacggggtttgggaaggagcctggggccaaaaaaaaaaaaaaggtttctgcttttagagctgggtgcagcctgattatttacggctgagggaaaaacaacttggtttgaaaacatagaagagagaaacgggaattcgtgacgcaaggtcttaggagagatgagtttcagagcaggcttggggaaaatgacctggttcaaggaagctgggaagggtgaagctacgtacggctggaaggtaggtttctggagtgtcttaaataactctaagggcttagagtcaaggccctgggtattgggaattccctgggtgatgggtttgtttgtttgtttgtttgttttttgagacagagtctcactctgttgcccaagttggagtgcagtggtgcgatctcggttcactgccacctccacctcccgggttcaaacgattctcctgcctcagcctccggaatatctgggattacaaaggtgtgcagcaccaagcccagctaattttgtatttttagtaaagagggggtttcaccatgatggccaggctggtctcgacctcctgacctcaagtggggttttttgagcaagggagcaacacatcactctggtgaccattcagggtcattgtgccgtacaactcaggagaaaccatttacaatcccatagaacacaatgggaatggcgccccctggagttgtgcaaacatggcagccctgtgaggaagggcaggagctaagaggggtatgaggcaggaccttctggtgggaagctcttggagatttaattaaggtctgactagggggttgcaggagggacagcaaaatgatcacaaatgcagtctgacagcaggtgggatggtaagagggcacgagggcctgagtgtaacttgtttatggaaggaccttcaggaccggggctggctgcactagggagataataaattgaggttttggtagttgccgttgctcaagaacaaagaaggaactccacttagatatggtaacattgaaaaaaatatatatgatggtagataaattcccaggtaagacccatagagggaatttagaacttaccccaaaaagcactattggaaaaatctggaacttttgagattgatgtagggaggccacacatgtcctactgaaatcaccttttagtgtctttcctacttgatctaatcgcctcctgtctgctcccttcaattcaactatatcctagtccattcaataaacattaattgagcatctacaattcctcaacattagagatcaaaaataaacgatataatccctgctcctgattggctgtcaggctagtgagagagacagaagcataagcagctacaacagaacatggaagatgctcaactagggtttctgcagaggaacaggggagggcagaggcaggatctcaccaagtttcctgtgcatgtggggcaatgttgagcctcccttggtcatctttattcccaaagtcccagaagctggagcacagggcgaagaaagagtagaaagcttggaccccacatttgctcctggattcctcactgaggccataagaggtagcgctggcctcagctcagcccctgagtggctgtgaccttgggatgccacttgctacctgtgagcctggaagtgggtcttgggccagtcctactggaggttcccttgactgcatggtgttctcacagttacacagttagccaggtcagacagtagatctcaaggagggcaaaagccgccacctccaagaaggctgccagatacaccttttgctctgcctgacaagaacctccacagattccaaggtccagctctaggggtgcctcctctgtggatcctcctctgaccccctcagagataagtctctggcttccacgtgcttctgctctgagtggggggttctccttctgctgcataggacagagaggacatccaactcagagtagaagcatgccctctctaagttgtaaattcgatgatgtcatctccatatttcattgcctggcatatagtaggtgttcagtgctctttgaaaggatgaatacattaacaaatgtcaaaatctttttttttttttttttttgagacggagtcttgctctgttgcccaggctggagtgcagtggtgcgatcttggctcactgcaagctctgactcccgggttcatgccattctcctgcctcagcctccggagtagttgggactacagtcgcctgccaccatgcccggctaatttttttttgtattttttttagtagagatggggtttcaccgtgttagccaggatggtctcgatctcctgacctcgtgatccgcccaccttggcctcccaaagtgttgggattacaggcgtgagccaccacacccggccacaaatgtcaaaatctcatatccttcacagtgcccatgtcactgcccctagaagtcttcccatgcctcccttactgagtcatctctcttttccccatactccaataggatgctgtttgaatgcctacgctagaacagggctggcaaactttttctgtaagggaccagatagtaaatatggccttgccagacgtaaagtatctgctttaatgacttcactttgtcactgcagcacaaaaacattgtgcagccacagagaacaaaaatgaatgagtgtagctgtgttccaataaaactttatgggccgggtgcgatagctcatgcctgtaacccaagcactttgggaggccaaggcgggcagatcacttgcagtcaggagttcaagaccagcctggtcaacatggtgaaaccccatctctactaaaaatacaaaaattagctgggcatggtggcaggtgcctgcaatcccagctactcgggaggctgaggcacgagaatcgcttgaacccaaaaggcagaggttgcagtgagccaagatcgcaccattgcaatccggcttgggggacaagagcaaaactctgtctcaaaaacaaaaaacaaacaaaaaaaaagtgcactaacctgacccggtggtgccaggcttctcactaggcagtcggtctggcaccagaatccggacttctcagctacacactctgtgcaggctctggaagtctggcgaggccaggttttgcctgtccagcctgggctctctctggcccttctagcagcatcaacagtgacttcgggaggctgaggcatgagaatcacttaaaccccggaggcggaggttgcagtgagctgagatcatgccattgcactccagccagggtgacagagcgagactgtctcaaaaaaaaaaaaaaaactatttatggacactgatatttgaatttcatgtaatttccacatcacaaaatattattcttattttgctatttttaaaaacattaaaaattaaaaaagaaaacatttttagctcatgggctgagctaaaagaggctgcagtctatgtttggtgtgtagaccagagtgcaccaacacctgcttgagagcttactaagatcggcttgctaataggcttattttggtctcgcctattagcctataaaaagaagagttaggaacacagcctttggatgcagatgggtctgtattaatattctgatcccagactccctctctctttttcttccttttcggtcaaagtcactgggcaggtctgctaagggccagaaggcagtccaagggcagccaggactcaaacaaggagggtgtgtcaatttcctagggctgtcataacagaaactgggtggctagaataacaaccatgtcttttctcactgttctggaggctagaagtccaaagtcaaggtgctggcaccgccatactctctgatgtctccagggagaatgcttcctgccttcttccagcttctggtggctgctggcaatccctggtgatccttaacttgtgggatccctccagtcacatgactttcttcttcctgtgtgtcttcagttgttttatctctagggctgtctgtctccgtgtccacactttccccattttataaggacatcggtcatattggattatggcccacccataagacctcattttagcttgattacttctgtaaagaccctatttccaaataaggtcatattctgacatactggggattagaacttctgcatatctttttgggagacacaagccaacctcataacagagggtgtcagtacagggcaggacccaacccagcatggaagtgggctatattcagtggggcaggaggaggggagaagctatgtaaatacactgacaacaatagtgtagtttcacacagataagaagggaggtacagatatagacagagagaaagctagaaagaaccctgtggtgttggattggaactggcagtataagtgtgaactcatggttttcaaaatgataggtatagaaataaatacagctggtcggacgtggtggctcaagcctgtaatcccagcactttgggaggccgaggcaggtggatcacttgaagtcaggagttcaagaccagcctgaccaacatggtgaaaccccgtctctacaaaaaaaaaaaaaaaaaaaattagccgggcgtggtggtgcatgcctgtaatcccagctacttgggaggctgaggcaggagaatggcttgaacctgggaggcagaagttgcaatgagccgagatcgtgccattgaactccagcctgggcaacaagagcaatactccgtctcaaaaaaagaaaaaaaatatagctgtaagtacaatatacgcatttgttcattcattctctggctctgtccagtgagagacctgaggacagtgacacttgggcagcagggagcaagatcaccttgtgtgtgtatcttggctctaaataccattctctactatgaggaacccaagccccttggagaaaattcccaagtccgagcccagggcaaggtaaataggagaggagatgagcatttcatgctgcctgaaagtcagggaggtcttaaagaacgatggggatcattgaaaaggacacaggagcccatttgaaggagctgtcactggccaaagttggcatgatttgagcattaaaataaatcatggtaggtactgactgtaagccatttaataaaatagaaatccgtgagtccacactgattatataagttaacaaagaacacaagaaggaaaacaaactcttccttaggtagaatgccaactattaaatacaaaaggaatggtgacattttatttatttatttatttaacaatagcaacttttattttagactcagggggtgtacgtgcccctttgttatctcataatactttagcattttagaatagttttttctaattctgtgaaaaatgataattcatatcccaaaccacatggtaagtgtagtacccgggtagttagttcttcaatccttgcctctctgcctcacccctctaagtagttccctgtgtctattgttgccatctttatgcccattagcacccaatgtttagctcccacttataagtgaaaatatacagtatttggttttctgttcctgcattaatttgcttaggataatggcttccagctgcatctatgctgctgcaaaggacatatttcattctttttatggctgtgtagtattccgtgggtgtatatataccgcatttcctttatccagtccactgttaacgggcaaccaggttgattccatgtctttgctattgtgaatagtgccgcaatgaacatacgagcacaggtgtctttttggatatatactcagtaatgggattgctgggtcaaatggttgttctgctttaagttttttaagaaatctccaaactgctttccacaatggctgaactaatttacattcctatcaatagcatataagcatttgcttttctctgctgcctcaccagcgtctattgttttatgactttttaataatagtcattccaactgatgtgagatagcatctcattgtggttttgatttgcatctctctgatgattagtgatattgagcatttttcatatctgttggctgcttgtatgtcttctttggagaagtgtctgttcatttcttttgcccactttttattggggttattttattttattttattttttgcttgctgaattgcctaagttctgtacagattctgaatattagacccttgctgcatgcagtgtgcgaatattttctcccattctgtaggttgtctgtttactctgttgatagtgtcctttgctgtgcagaagctttttagtttacttaggacccacttgtcaatttttgtttatattgcaattgcttttaagaacttagtcataaatttttccccaagaatgatgtctagagtggtgcttcctaggttttcttctaggattcttataatttgaggtcctacatttaaacttttaatccatcttgagttaatttttgtatatggtgaaaggtaagggtccagtttcattcttttgtgtatggctggccagctatcgtatcaccatttattgaatagggagtgcttcccccattgcttatttctgtcagctttgttgaagatcagatggctgcgggtattcagctttatttctgtgttccattggtctatgtgtctgtttttataccagtgctatgctgcttcgattattgtagccttagtatagttttaatttgtgtaatgtgatgcctcaggctttgttcttttggctcaggattgttttggctattcgagcttttttttggttccatatgaattttagaatagttttttctaattctgtgaaaaatgacagtggtagtttgacaggaatagcattgagtttgtggaatgctttgggtgtatggccattgtaatgatactgattcttccaatccatgagcatggaatgtttttccaattgtttgtgtcatctatgatgtcttttaccagtgctttgtggttctccttgtagagatcttttatgaccttgcttagctgcattcctaagtattttatttgtgtgtgtgtgtgtgtgactattgcaaatgggattgcattcttgatttggctctcagcttgaactttattggtgcacagaaatactactgatttgtgcacattgattttgtttccaactttatagaagttgttcatcagttcccggggacttttggtggagtctttagggttttctaggtataaaatcatatcatcaaggaagagagaaagtttgacttcttcttttcctatttggatgtcttttatttctttctcttgttagattgctctggctaggacttctgaatgacagaatttttaaaagtcaccatttggcaatgatcatcatgataatgtttaattaaattaaggaacatcattgcatactgaaattatacaagtgtgggagtgggatgagaaagcttaaaagtatctccctaccaaatgcttataaattacgatgtggaaggggaagtaactttacaatagagaaacttgattggtgtcaagttaatcaaatgatcagagcgaacgacattagtgatgggacagattgacaatgaaagctaataggactcaccaagaataatccagcatcacttctgtgctattttggccaaaaaagcataacccagttctaatcatcagacagagccaaatcgagggacattattcaaaacaaccaacctgcagtcttcgagatgtcgaggaaaaaacaaggcatctgtttcaaactggaggcccgaaagacatggcaactaagagccatgcatttagagagaatgcaaagtcccggatggattttcttgttacaaaaccattattgagaagcttagcgaaactcaaagggggtttccacatgaagggtatgtgagagttctttgtatcattcctttaacgctctgtattttgaaatagtttcagaataaaaatggaaatggaaaaaaatgcaatgttaacatatacgagttactactttcaacaagttatcttccttttcatgcctcaatttcttcatctgtaaggtgaagacagtaacagctacataaaggttattgggaagagatggagaagcccccagccgaaggtctgctcacagcgtaaatgctcaagccctggtcattatgagtactacgttcttgccaacattttcttgggtttcttagtctctaaaagatcgtcaattgcaagacacggtattttacataccactgaaggaaaaaacaaacaaacaaacgaaaacattcaatgaattcctgacggtgtgattcttctcgcttagaacttttaatacttattgagagaactctgttagactcattcaaatgtagatttttatcccctgctgctctatgatgacttttaaaaggaaagggtcagtcaagtgaattggctgaggtgttcctaaagctccttcacattttgggtctggtgtccggagtgattttgactcagagtctcgggttcttcgtttctccaccagacagcatcctctgtgctcctgagggcatccaggcccgcagcctcccagtcccacagaggacctcagcaaagacaggcagagtggggacacctgggagaaaagagagcccgggacgtcactttaattccatcctctccagccctggagaagcccctgcagggtttttccatgccaggcagggacctcacactgaccggagtgcctgagagaaccacacatgccttcctctaccctgggctttctctgctagggtgaggccctgccagctcttcctggccaaccctgcccttcctggtaggaggaaagcaaagaacaacaatcaggccagaattccagtggcttcgaggcaggttcctgcccctccatttcctccattcccctcattcttgccctccattcccctcattcctgcctgctgccctttctcctgggaggcagccccatgtaggagaaatatgactgcgttttgttgtgtcttggcactgtgattcatcttgtctttattcaaacttttcatatttggttcaccgtgaatagtttctgcatcagttgggatttttttaaaccatattgcattaaaatattacttacaacaattactgaatttttaaatgcctgtttaaattttgagcacgagagactgcctcactcacctgaccttaattctgctggccctgctgtgctcagggagccactcattcattcattcattcattcattcattcattcattcatctattcatttgcacacagtcaaaggtgcaatttctcctctgtaccaggccatgtgctaggtatttgggagggaagtgcaagccggacacaagccagcactgaagatagtgtcagaagaaagacagccatgaacacacatgaccatatgacacatggtggggtggggcggcagggcaaagaggacatcggggaaatcaacatgccaccagctaccacttgtagggggttctcctgtggccagctctgagctaaggtcttcctgcacagaatctcactggattccctcaacagtccttccaggtttgtagatgcttctgcaaaagtaacagacagatggatgtcccgaggcttggggaagtaacacgcagatgatttgcacaaggacacgctttaagaagcagtggacttggaagtccaacacagatctgtctggctctgggctcaaaccagctatggttattgcagccacttccacctgcatccccatcaagcagtcagggaaggctgcatggaggaggccctgcgtcagctgaggcttgaaggaggcctaggagtttataggaaggtaaattggagtaggaggctttctggaagtaagaaaagtcacgtgcactattagcaaagtaggcctgggccggcactgcttcctctttctgcttctctgtttcctgatgacatcaacataaataggaaacgtgggaggctcactctgcctagaggctccagaagaagactggtctctcccaccacacagaggtatggcccggcgtccaggagcagggctgaggggtggggtcagagcaggggggaatgtggggagtccaggatgaaaaaggacagggggagcctggggggcgtcctgtgggtagctgtgccctggggacttggaggagttagggcttggcctcttaggatgacctgagcccagactcctagggcggccagtggatggggaggcagccaggggtgccaagctgcttgggtgttgtaggagagctctggggaggactcagcctcgctagcgggatctggttggtcctggtgggaaggacgcctagtggggtgaagagagctcaggcctgggagtcaggcacctatagtctgtcttcgctttgtcactaagatgctggtggtagtgagagcaccccctgtccaccctgggcttctgtctcctcatctgtggaatggggagcatggatagtccctgacatcttggtttagaaagagagagaacgcatgctcgtgtgtttgcccgtgtgtgcatttgtgtgtgtgcctgtgtgtgtatgtgcatgtgcggatgtctggggatgcaggagtgcagagagactaagaggcagagggtgaaacctggaagcttgctgcgctgaggcccagagctgggtgcggtgtggcttgagaagctcactttgaacttgagaaagagcccagcactttgcccagagacataccaggcactatccagcaatctctctctctctctctctctctctcagtctctctctctgtctgtctgtctttttagttatgacactctgccctgctgatttgggttgctgatttgggttggggcccaggtgtgtgtgttctgtacccaagtatgctggctgggtgggtgggtatctggggtgcctgcttcagggtgtgtgcaggtgtgtgtactggccctgagaatgaaagggcaggtgtttcactgggaccttgtcagacaggtgctagcgacaagctgcatatgtgcaatttttagtcttcaaaaaccctgctgttatatttttgtacagcccaattctaatttttttctatcatctttcctgctttgtaatcattttataatgagtaaacatttcctattagcttttggtcactctttttttcatccagcagttttatttatattgttccagtatacagatataccaacaccacaggataattcatgagttgtataaggaatgtatttaatgctaaacaagcaactacacagaaacctaccttcatgaaaattagaataatctagaattatgtagcacaagagacaaagtccccagcaatttcttttccctagttccatagcttattcttttcaccacatgtattcttccagaacattttctaagcatgatacaagcatatagtttttcttttcctgtttgttttttgttttgttttgttttgtttttgtgacagagttttactcttgtcgcccaggctggaatgcagtggtgcaatcttggctcactgcaacctctgcctcccgggttcaggtgattctcctgcctcagcctcctgagtagccgggattacaggcatgagccaccacacgtggctaatttttgtatttttagtagagacagggtttcaccatattggccaggctggtctcgaactcctgacctcagatgatccgcctgtctcagcctcccaaaatgctgggattacaggcttgagccactgtgccaggatggtagtttttctttttacagaaatgggattattttatttatatatatatatatatattcctaattttttcacttaatattgtattttggaatatttccaaatttctacaataatacatacagatttaactcgttaagtaaccctaagaaatatgtggcatttattaggatgggtacaccacaattcatctaatctcacgttgatcgacacctagattgtttctaatttttccacatctgtgaaagtgtttctgtagcctaaattactaaatgcagaattgctgtgcagaggttgtgcgttagaaattataataggtattgtcaaatcagcctcaaagtagctgagctaagctgacgtccccaaggtagtgcataaagggtccaatttacctttagagaaattatcaatcttctaattttgtccaatattatgtatggaaattctcaatgtcgcgtgatttttttctttccctgattatgggtgaagttgtacattttctatatgtggattggccttttggatttcatttatgatgaatgtggagaaatttttgttcatctcctgttgaattctcttttacatcttaacttttggagtgactcatttattacgtgtattaataatccatttatatatgttgaaaatatattctcccaggttatgacttatctttttctttaccatgtttaagatgtcttatgtcatataaaaatgttttcattgttaagtcaaacctgtcattactttttactttatggtttctgattttggtgtcttgtaaacctctaagatcacaggtgtcttgtaaacctctttttactttatggtttctggtttggtgtcttgaaacctctaagattacagaaagagttttaataattttactattttggttttgactttgagatttttagcccacctagaatttagagaagtgagtaatgtgtaaagtaacttttaaaaataattaccatctaattgtcttaacattgctaattatgagtgtgtgatttctcctctcttcaatgatttgaagtgcccctattacatcctaggcttctatacatacttcgttattttctttattgttttctcttccatttggctgtcactacattccttattatttttctaacgaatggagcaagtctctcatctctggtttgttataatttagaatcagtttgccaaggccaggcacagtggctcatgcctataatcccagcactttgggaggctgaggcaggcagatcccttgaagttggacgttcaagaccagcctggccaacacggtgaaaccccatgtctactaaaaatacgaaaaattagccgggtttggtggtgtgcacctgtaatcccagctacttgggatgctgaagtgggagaactgcttgaacccaggaggcaaagtttgcagtgagccgagatcacgccactgcactccagcctgggcaacagagtgagactccaactcaaaaataaaaataaaaatcagtttgccaagcccattaaattcctttttggaattttcatgttgattgcattgaatttagagatgatctgagggacattgaccactggaagtaaagacaatagtgagagcctcctgtgtgaggctttgacaggaggacactaacgtgcccccttgactctgtcatcgcctttggtttctggcagactttcagtgatgccaacgtttccgccactgcttcatttgccagggtttgtttgttcatttaaccagaaatgtcttgtttattattaaatatttaggagtgtctgtcaagatcagcttatccttttttcccttttaatccgttcatctgtttgtttgaatcataaataggtttcttaagggttctccttccatgtatggagtaccctctacttggccatgatgtcttcttcttttaaaagtctttgtcaggttgacctatgaaattgtttttgtctggagtgaatttgtattttgcttttcccccctagtttttatccctgccattcaatttcttcataagcttgggaatgtttatccctgccattcaatttcttcatgagcttgggaatgtaatatgtgcatgtttattttgagtaagaaggtgtttggtttttctcttctcttttctctctcttcctttctctgtccctcccatcccttctctgtcatcctcctgtccccatgcttactcttcattcttagtgatttttaatctttatgtttttagggatttaaaatgtattgaacttatattttctgggtcgggcacagtggctcacgcctgtaatcccagcactttgggaggccaaggtgggcagatcacttgaggccaggagttgagaccaacctggccaacatggtgaaacccagcctctactaaagatacaaaaactagccaggcgtggtggtgcatgcctgtagtcccagctacttgggaggctaagtcacaagagtcgcttgaaccccggaggcagagattgcagtgagccgagatcatgccattgcactccagcctgggtgatggggtgagattctgtctcaaaaaaaaaaaatagtattttttttaaagaaaccatatttgctaccagcatttgggtttatttagcacatatatgatcttccaaaacaagaggagatctttagcaagttttcagttctcttccattctccaccccagcctcacagcaaactcccacattaaaatcatctgagttttagttcaatattcttctttaacttatctgtaagtgttacaggtttatttacctcagtatttcagctttcttggatttttttttcctgaaatataacctagagtaatttctttcagaaaagatctgaaaaactttctttgtccttacatactcaaaattttttgtgtcctttaaatgtcaaagaaaacttggcattttgtgattctaggtttaagcataattttcccttggtattttcaagacatctatttaaagttcagagtctcttatgtgaaatctttagccaatctgacccttgttgcattcaaagtatcctatttgttttcttctggaagcatttctgggatcatcctcatattcttgcaagacgaaaagtttaccagtgagaactaggcatggctttattaaaaggaatcttgggagttaaccctgatctctgtcccctactacaaaacctcatcgtagtagcctccccccttgaatacagattccttactgtctttgaaaaatattttaaaaaggagtcttgttctttattgagtggcctcttgtctccttgaaagccctgtgaagctttccccatttgctgttgtatctgtttggctgcacatggaaaatccctaagcaacagaggcttaacaacatagaagtttctttttcccagcatataaaagatgcccagaggtagcagtttcaggctagtatggttgctccagagtgagagtgggaatccagcttcctctctttctgttgcatcatcttcacatatggcttccatcctcaaggtaacctcatggtccaaaatagctgctgaagctccagctatcacctccaagttgcaggctggaagaaggaagaaagacagagggacaaaaatgaacccctcccacctaagtcaactgccattgagcagccttttttggaagacatacacaatgtttctattctcatctccttggatcacgtttagtcacttgactgcacctagtggcaacggagtataggaaggaaatagacctttttattctgtgtagcaataaactcagctaaaaccttggcttctgttgccaggaggaaagggacacggtcttccattgtctttcagactaggtagctgacattgtctgccatacctgctcttaattctctccaccccctgcttctgaatgctggaatttttgaatttctttcccaaacctaaagttttctctaagacttttcatctccttgactatttgctctattttatatatctatctttttcatttgtggtatccattctgtggtttggcccactattgattgttgttgtttttttgtttgtttgtttttttgagacagagtctcaggctggagtgccatggcaacggtctcagctcactgcaacctccacctcccaggttcaagcaattctcctgcctcagcctccagaatagttgggattacagacgtgcgccaccatggccagctatttttttttttttttgcgtttttagtaaagacggggttctaccacgttggccaggctggtctcaaactcctgacctcaagtgatctgcccaccttggcctcccaaagtgctgggattacaggcgtgagccaccgcgcccaggctttgattgatttttttttaaattatggatctcatatcttcaaattccaagaactctgttctttgcatagaagtgtcttcttttaaatggctatgattctcaaatctccctgaggatgctgatttagatgtcttaatgtactcttttatttttgctgtatctgtacatgtctgtagaagtgtctgctgggttagcatatgtcagaatagatgtgcgctgttttgacatttgggaaactgaatcactattggcatagaggtcagggacagagtctagaggcagcccactgcgggctcgaatctcaacctgttccttaccaaccgtgtgactgtcgaccaattacataacatcccacccctgttttctcatctacgaagtggagcttctagtggtaacctatacatagatgtattcatatccgtaaaaccttttgaataatgcctggctcatggaaaacactgcaatattgtcagccactatcatgaattctctctgtgtatgtgagtattgtttgtgctctttgatgatattgatttgttttaaccttttaaagtaaaagacactaacctgtcctccataattctggttggtatggtctatatgttgaagtgcacccaagtttatgttgcaacctaatccccaatgtgagaatatctggaggtagtgcctgtggcaccctataaaataccccagcgagctcccttgcttattccatgtgagattatagggagaagactgcaaggaacaggccctcaccagatagtgaatctgcccgcaccttgatcttgaacttcccagcctccagaactatgagaaataaactttgttactagtaagccactccatctatggtatgttgttacagtagcctaacggatgagtacattggtgcaaagattttctgtttgcactccgtcctttccttttatggttcagtcagtttgacaaattacagaagatttcacttttatgtacttctgccagcctttgtctctgtgatgtctcctatgcttttaagcttaaagagttcaaaggcattcactcctctggtttgcagctttcataggatgtaacattttacatttaaatttataattaacttgttatttggggaatggtgtaaaatggggttttagataggcatttttatgttgttaatcaatgattttagcatttttttaaatttaatatttcatcgcttcacattgattcctgattccttctcagtctggggtcaagtagagtttgtttccagccagcatgtccattgatagattctgtgtgtgtgtatgtgtgtctgtgcatgtatctgtatgtgtgtgtgtatgtctgtgtgtaggtggtatatgcgagtgtgtatgtgtgtgtgtgttgtgcatgtatgtgtatgtgtgtctgtgtatgtgtgcctctgtgtgtgaatttctgtgtatgtgtgaatgtgtgtgcatgtttgtgtgtatatgtgtatatatgtgtatatacatgtatgtatctgtgttgttcatgtgtgtatgtgtgtctgtgtctctgtgtgtgtgtttgtatgtgtgtgtgcatgtttgtgtgtgtatatgtgtgtatattgtatgtatctgtgtgtgtctgtgtctgcctctgtgtgtgtgtctgtgtgtgcatttgtgtgtatacatgtgggtatgtgtgtgcatgttttgtgtgtacgtgtatatatgtatgtatctgtgtgtgtctgtgtgttgtgcgtgtgtgtgcctgcgtgtgtccgtgtgcttgtgtgtgtgtgtgtgtttgcatgggcatcttgagtgaagcttccaacaatctaacagaagaaaaggagccacacttgtctgttctgctctcttgggtacttcccagaccagtgaaatgaaagggaggaaacccccggcctccgaggagaaaagggaactggcaagcagagggtggggggatgacggtaaaaggagcaggggtggggagagcacaggccctgtggaagtgaggacatgtgtgtgtacatgtgttcatgtccaggggatgacactgtggcatccaacagccgtggaccagcagcccacggggagcttagtaggagtcaaatcctaggcccctgtctcagctgctctgctgtctagcgcattgtgcagtggtaggtgtcagtgatccaagtggggacccagtccctcaggccacacagcgcatgtccattgccttcatgccgcaggagactgagaggtcatgcatgagggccacttctctgggttgtccccacaacacgggcggtgtccctgggacacgtggaaggggaggggcagctcactgctgacatctccttctgcaggcctggaggaggcagaggccaggagggagaggtcccaagagcctgtgaaatgggtctggcctggctcccagctgggcaggaacacaggacttcaggacactaaggaccctgtcatgcccatggccagcacccaccagtgctggtgcctgcctgtccagagctgaccagggagatggtgctggcccaggggctgctctccatggccctgctggccctgtgctgggagcgcagcctggcaggggcagaaggtgagtcccgtggctcccacccacttccctgtccctgtcctcactgctgcaccctgggggagggccgcagcgtatcctcaggatcctgcccgccagccctcctcctgctcccctccctctgtctctccccctggccttccctgggcctcccccgcttccctcctcctgcacattcctgctcatcctgtcttggaaagtccagctgagcgtgtctggcttccttgcccacatttctcagggcggcactcccggcccctaggctccaggatggctgctctggccgtttccctgcccctccttccccagcagacactctctgtgcctcagtggttcccacctccgggactttgctcctgcagggccttggctggggttctctccctgcttcagccgctagcaccctccttgtgcctgaagcccgcactgggatgctcctgggctcttgaggtgaaatggcccctcccaagggctcccagagacctggcttctgtgataatgctgggaccacagtccccttaacaaataccaggctcctgaggacggggactagagaggaggtgggaggttgcagggtagaactctgccacgctgcatcccagggctgagtgtgtgccccctcccaggctgcacagtcggtccaggggccaggcctgtgcttgatgcatgtccctgtcctggggtggggggaggggaccgtgcccaggaacagcacactgcggaggcccagaaaccatgctgagaaccaacagaatgtcttgcttctgccaggagaggagggtccgcaaccaggagcccaccccggcagacatgaacacatgtacatgtgcctggccacctggtgcctctgcagggacctgggagacccctccccagagcgggacatcccaaagcagctgggggtgatggtgacaagggtccctgcaggaaagagaggtgacccccttctacccctcttgtcagaaaccatcccgctgcagaccctgcgctgctacaacgactacaccagccacatcacctgcaggtgggcagacacccaggatgcccagcggctcgtcaacgtgaccctcattcgccgggtgaatgagtgagtgatgctgggggcaggggccacgggcaggggctacgacgtcccctgtgcctggcatggggcgacagtgtagagagggacctgtcaggtcagcctcggggtgggagtggacagaggacagaggaggagggaggccctgcaagagctcctgctccgccaggcacctgcgaggccgggtgctgccgtctgacctggggtttctgcggagtgcctcctacactgatgttggtgacaatggtggtggtggcaatggtgaaaatcttctcttgtttcatcacaatttaacacaattgccccacatgacctatcttagttcctcctcactgtgaggtgggcagggccaggccacgaagccccagctgtgccactgcctgcctgtccagagtagaccaaggagagatggcgctagcctgggagttcacagatgggaaaactgaggccctggaggtgaggtgccagccctggccacggggtagacagtggcagagcaagctgtgtggacgtgtctgggagggggctccgcgctctcccaggccccccctccgtatgtgggctgccacctctcccacccaagctctcctgggcacgtgccacaagggaaggggaccagaatcgctctggggtgttggccagggtctaaatcagccataaattaagtaattaaatagctggaaccagagaggcagatgacaacccattggaggtcaccccagcgttggggggcggggccggctctgccacccccacccctccaccgccttcagttctccagggcgtctctgtcggaccttctccattctcctcaaagaccatcctgcccctccctgtgacctgcttcctgctgctctgacacaacaggggaccagggagaagctccccacccaccccacactcacactccccaccccctttgcccaccgccggggcctgggcctggaccagggctcctgtctgaggcctgagacacgatgctgtctggtcctgttgctcaggaacatcacggcccccaagtccccactctgccctgtgccacccaccatgccctctcccaggatctttcccaattgccttgcaaacctgccccaaccccctctcagatgcccacaggagtgcagcgcctgggcatctcctgacctggcaaccctgcggcccctctttctctgcttcctttgacagcagcattccctaaagagttgtccacattcaccacgtccagtgtctttccagccatttcctcctgggcccactcccctaggatgctgcccccaccaggccacccaaactgctctggtccaagtcagcaaatgtcccagggagcaggatctcatggttgggcctccgccttcttcctacttgaccaggggcagcccctgacaaggaggaccaccgcggcctccctgcagtttctcttgcacctgactctgcccacagctcacccagtgcccccggggccctgcccatcctcctctttctccttgtctgctgcctcctgatggcaagacacccaggcccagtccatggacctcctctctgctgtatccactctgcagagaccccctcaggcccctggggcatctcccaaaggtgacctcaagcccacaattcccctaagctccagccctccaggcgtactggcctctccacctgtcacttagacaacaggtgtctccgactccaaacgtcctcaaccaaagtcccgctctcacccgagctgcgctgctgcctctgtcttccccatctccctttctaaatgggagctcctagtggctcaaactaaacaacagggaggattttgttttgtttttaagtctcttttgtcaccattccttcctgactgctacatccctccaccagcaaatgctgccaaccttatctcaagcagaacatgaatctcacccacgccagcctgaccaccctgttgcacgccacttcctgtcacctgaatattccagaagcctcgtaactgggctccctgcttccaacattgccacattcccacctcagtctattcgcaaccgaggaccctcaggaatcctttcaaagcatttatcaaaatctacaacacctctgctcatgactgtttcccactcactcgcagtgagatccaatcccatcatgtagatggatgggtctcctagacctccctatcacacgctctactccctgcgcactggttttaggccaagccacgcagcacaccaaactctgcctgtcccagggcctttgcacgtgctgttcccatttcctgaaatcctcacaatttgcacagtccctccctcaatgcctttaacattctgcccccaggtcacctccttagagaagcctgcttgtcccatatttcaaattgcctccctggcccagcccttcctccctcctcacctgcttcttgctttatttttccacatgaagttctctccactgcacacgctacacactttgttccatgcgggtccccttctcccaggatggcagctccgtgggcaggatttttgtgtgttttatcactgctggcccctgattctgaacagagccaggcatgtggtgagcactcgaggaacctttcgtgagtcagtgatacccatacaccctgggctaagccgtgtcctctcccaacagggacctcctggagccagtgtcctgtgacctcagtgatgacatgccctggtcagcctgcccccatccccgctgcgtgcccaggagatgtgtcattccctgccagagttttgtcgtcactgacgttgactacttctcattccaaccagacaggcctctgggcacccggctcaccgtcactctgacccagcatggtgaggggctgggggccctgcccggggcttggtttcctgtgtggacagcgggggcaccaggggtggtccagggagtcttcaaggcagaaggctgtggcttggggttgggtgagggtttcttgagggatgagggtatggtctggttacatggagacttcagagcagaggggcccctgacaaaggcttctcctgtgcccctggctgctaccacctcccactaagccatgggcttccagcactgcaggcttgtcttgaagaaaaccgttctcaccactcacttagaaacctaccaagttagaaaactctgtccgcttagttgtttcatctcatctctgaagcaacccatttcctggatgtggcccttgaggcccaggaggtcagatgcctcctctgaagtcccacagctgagcagtaatgacagagatggggtcagccttcccgggggcttcctgcatggtagacagggagcttgtctcctcgctgccctggaggaggggccccggtgtgggccgaaatcccacagtggtccatgaagccatctgtggtctagggtggggtagatgattattttatgtagttaggttttatttgcctctatattagaaagaaatataacctgcacttcgaagtcctggattcaaggaaatggttgcttagaatgaagctaaacctgaaaagggacacgttttatgaaagttttcgttgacgtggcaaaaacccatgctggtggcaggctggtaggaggtactgcaggctgtcattgggagtctcagaaccacggcaggcttggtgctgttattggtgcctttggctgctgctgaaacggagacagagggaggtgactagtccaaggcctctctactgctgctggcagagctgagatccagtgcaggatggtctgagtccccggtcctaaccaccgaaccacctggtgctctttgcaagggtcacacggaaggggctctgaccatggcttcctgcccttttttgccacaacatcataaagccactgccagaggaggggatcagttaggccaccaggagtccatcagaagcaacatttccacacatgggtttgatggacacgagagtcccttccttcccgaatggagctcagggggcccaggctggagggaggggaaacactgtatgccgtccaccgtgagaacttactgacagtggcgggtgggtgcctcatgcagggggtaaagggcagggcccctgggagatcagaacaggcttcccagagggaagagctttgcaactcagatctgaagggtagacaggaggggagggcagtaagagcctctctggcagggtaacagctgtgcagaggctgggggatcagaagggcatgggcagctggggaacctgctcaccattgtgtccagggagcatcagcttcaagggctggacagcggtgggaagaagcaggagacacaggtaaggacctgtccctggagaggcttctgtctcctgcagtctcaggtagaggggaccctctaggcatggagagcactgaggggaaatgacatgatcagatgtggatgtgagaatgctggggacaggggacttacagggtagattggaggagcattagttgggaaagaagttgaaattcaggctgtggcctaaagcactcattcctagaaatgatgaggacacaactggctaggagatggggacatgagggcatgcaaatcatagttcagatatacacacaattcattcattcaaccttctttccttgagcgcctacataagccaacgaagcagtcaacaaaccagccagcaaccctgcccttggagcttacagcctggaaacaaggaaggtttctaaggcgatggagacaacttagatatagggagagaagtgtggcccttggcctcctggagcctgtgttgagtagcgaggtagggtccagcctaatgcagattagcaatgaatcaaggatgctgggaggtactgggcaggcgacaggcatgcatctgatctgctctgagtctccatgtttggagaccttggacattttacttcctctatgagtttctccgtctgtgaaatgagctggtggactcaagaggtttctcttgagttggctgagcaggtttctgatggggctcccagtctgcgcagtttgtggcagcttccgagagggctctgccgggaagagctccccctccatgacagcctcgggggctgggagtgcagtgacccatgagggacgcctgtcctggctgtgggtgaggaggggcggttcccctgctgtgtgtctgccgttctgggttgatggttcctgacatgctctagcatgccataacccatgtccagcagagagcacttacatcctatgtgtgaggatgttttcgtttgaaagccatccctcagcaagcagacaccagaaaccagaaatcaggtgccgtgtcttcattctgcattttcttgaacaacccagagttcccaggagatagatgcttgccttgtggctgcaaggatttcatgagaagccccaaagttgcttacgcgtatttgttcattcattcactcattcaccttgccccataattcactgagaagccgcatctcagcctggaggtagggaagggggtcaggaccaatcccacccacccccatctcctcacaccttaggggaggcagacacagaagcataggaatccctcagctgtggtaaggccctggtggagggaattccactgagctatggtgaaatgagagaaggaatgagggattccgcctggagatgcagatccgaggatgttcctagagccggaggcatttgcccggggcactgacaacaggaaggaccctgggcaggaggaagggagcttggacagcaggaggggggaggccgctgaaccgcaggcccctctgctagcaggagccacccaggccgcagcgtgggcagtggggagcctcaggacagaggaggctccaatgagtttcctcgccagcgctttttatggagttcgggtcacgtgcgcattgcaatctgcacggctttccattgctttcatgttgaaaccctacagttttgcagatgaagggctgaggctcacagaggagacgggtcttgctcaaggtccctcagctgctgggggcaggggtggcctggaaccccctgtgtccacacaaaaggccatgcaggccctgactgccccccagcggtccagcccttaggtgcccttcacttcctcccctccagtccagcctcctgagcccagggacctgcagatcagcaccgaccaggaccacttcctgctgacctggagtgtggcccttgggagtccccagagccactggttgtccccaggggatctggagtttgaggtggtctacaagcggcttcaggactcttgggaggtaggaaccacggccagctctgccccagcccgaagggatgggcagcacccctcctccagcacccactgtctcctgacaggacgcagccatcctcctctccaacacctcccaggccaccctggggccagagcacctcatgcccagcagcacctacgtggcccgagtacggacccgcctggccccaggttctcggctctcaggacgtcccagcaagtggagcccagaggtttgctgggactcccagccaggtaatgttgccagagcccaggaaatgccccgtggtgggagggcaggctcatcaggagctcctggcacagcagggttcctgggctccacctgggggcttcccagatctcctgctgccatctttccagtagcgtccctgggccgtcccacctctactgtgaccactgaccagtaggactctgcatctgttcactttgggtttccagttttctgcacgttctctgccaatggcaattacaataataacaacaacagtgctattagcagctgtgtgttaatggaggctacaggatgctcagggcttacccacatttttcagttcaatccccaaacactgaaacttagatactatttccattctcccgggagggcgtgcaggtgcacagaactctctctctctctctcggagctgttggacacacagctggcaggttcaggctgaagtttcagccctggtcttttggccccagagctcatgacctctgtgtgatgaatcacacggtgggcacccactgagagctatgggagggatgaatgacggagtacatgaggacctgtctccaacccaggggatgaggcccagccccagaacctggagtgcttctttgacggggccgccgtgctcagctgctcctgggaggtgaggaaggaggtggccagctcggtctcctttggcctattctacaagcccagcccagatgcagggtgagcatcttttttctccatcccctcccctcctcttggccttgctctctccaagcttcctcctgtccctggggccccagcagaagccacagcccaccctaagctctcctccctcccgtgtgccctccctctccctgccctcagctctgctgtgctcctcagggaggaagagtgctccccagtgctgagggaggggctcggcagcctccacaccaggcaccactgccagattcccgtgcccgaccccgcgacccacggccaatacatcgtctctgttcagccaaggagggcagagaaacacataaagagctcagtgaacagtgagtttgctcctagcccgctgtggggatggtctgggaccagcacaccctcattgtgtaacccgaatcagttcagggttcctcctggccccgtcttcatgtttgtcactttcaaagagatgcagtccagtgaccaaaagtgaacagagaagcaatgaaaccacgacggcagtggccaaaaacaggagcagatctttaaaacctctgatctcttgtccttttcttctgcttccctctcccatcctgcagctctctaaatctccactgctagccacaccctcctggtcctgtcaccaaaaccttccctttcattcctcattggattttcctctttctgatatccgaaattccccaccgactgatattctatctttaatgtaattgatctatgatgtacttttcaactggagcctgtggtgtgtacaaatagtgttgatccttggaggttaacatccctcgtttctgtgatgtaacaaggaccccagtgcaatggaacctctcacgttgtttcatgatgaccaagttcttccatccagtctttagcatatgtgaagggcagaggccaatttgtcttaattacctgggtttgaatttaccattaactctcttgggatcctcactggaaaaaggaattctgattgttcaaaagcacaggatatattaagggcctcatataatgcctggcacataagagacctcagcaaattacgggcattcatattatgtttatacagtgaaggcatcaaggttataagcattctcttttttcttttgggtagactgaagctcagagaggttgagtggcttacttaaagctgcacagctattagtaggcagatcaagattagagttcagaacttctcactccctgcccagtttctgctttctttaccctttgcctctttcaagttgtgggtctgccggccaggtgggaggtgctgtctgcaaagggcttccctttctctttggccactatctggctggggagaggcctcacctagatgttgttgaaggcctgttacagccgctttattggggattttctggcgatgagaacgtgtgaatgtcctggcctttagtcaactccctacacctctgagagtgtcagacaagagagcccatcacactggtgggattgcaatctttgcctctaccactgcttagctgcctttccttagggcaagttacttaatggttctgtgactcagtttccctgtttgtgaaaagtgaaggttaatagtacccaccatatagggctgttagaatggagtggaataattcatgtagaataagtatgtataacagtggctaaaacatagtcaggctgggcgcggtggctcacgcctgtaatcccagcactttgggaggccaaggcatgtggatcacgtgaggtcaggagctcaagaccagcctggccaacatggtgaaaccccgtctccactgaaaatacaaaaattagctgggcttggtggcgggtgcctgtaatcccagctactcgggaggctgaggcaggagaatcacttgaacccaggaggcagaggttgcagttagccaagatcacaccactgcactccagcctgggcaacagagtgagactccgtctcaaaaaaaaaaaaaaaaaaaatagccagttgcctagaatagaaccaactaacagtggttttatttttactgcaaaaaataaaaataaaaataggagtagtgcaagcactgggccacatcactacaaaacaagtgtatctcagcatctcccacgagaataccactcaggtcaaaacatgatatagtgaagtggggatgaaaaggatccaaccatgggcagaacctggggtctggtgccagtggagacagccccagtgtctagcatgagacacggggaatgttccgttggagggtgggtatgatgactctcctgaaagcttccctccctccagtccagatggcccctccatccctcaacgtgaccaaggatggagacagctacagcctgcgctgggaaacaatgaaaatgcgatacgaacacatagaccacacatttgagatccagtacaggaaagacacggccacgtggaaggtgagggcctttgcccagggaggggagaaacactggggagggcgggagaagggaaagcaaccagaggcattccacctgcaaggcgtcgggcccttggcaggtgaccagtgagaggtagccactgggacgtggtgatcactaggctgtgtggtcagcaggtcactgtcctgtctcttggtgaagtaactgaggtttggaaaagtggcgtggcttggccaacgtgaacagctgaccctgagtccccaggcaacagaagaccctctgggcagggaggggttgaaaggccactgggaagaaggttttcaaaagtcatgaaagtttggggttatttcctcagaggaatctcatctggacacacatggaggctcagacagagctgcttctaatgagtcgggggtgcgcccaggccagggctcggtcccctgcctccacagagcccagaacagaaaccacagaaccaaccccacaccttcagtctagaaatggggcaactgaggctaggagggaggtgggccagtggtggagccaggagcgggccctggggtcctgaacccccattctcagggtccagagtccagtcggcctgcactgcgttcctaaaaaggccacaatatgggtgcaagctgccccagaagggctgggagctgagaaggctcaaaatagggtgggacaggtggcttcagggttctgggcctcagtgttgtcaatgtcaggggctgcactgacaggtggagtccccggtgccatccgaagtgctgtccgtgggtgggccctcagggaggatccacggtggtgagagagaagccgcagcaggcctggggtatggcaggagctaggagccagcgaagccgagggtccaggtgggagggatttgcagctgctcccacgggcaccgggccaggcctcaccctcagtgccaacccacaggacagcaagaccgagaccctccagaacgcccacagcatggccctgccagccctggagccctccaccaggtactgggccagggtgagggtcaggacctcccgcaccggctacaacgggatctggagcgagtggagtgaggcgcgctcctgggacaccgagtcgggtaggtgaaggctggagtccagagcttctggccaggaccagctcatagtttctcactgccagaaaatccccaatgcagcagccgtagcaggcctgcaacaacttgtaggtgagccgtctccccgattagatggtggccaaagagaaagggaaggcctttgcagagagcacctcccacctggtcatcagacccgcaagttgaaagaggcaaagagtaaagcaggcagaaactgggcgtggagtcagaagttctccacccactcttcatgagacagcacagctgggcagaggatgccacatctctgggtgggcacagagatgtggggctccagaccccactccactcaggcctccttccctcccttggaccactagtcgttggaaagtgacacctggtgttcagtacagactgcaagtgaggacttgagggagcagaggagagcaggtctcatgatcgctcctcctttaaactgggacttaggcttctgttaatatggcccttggtttcttagcttttgggactaccaagtttttgtggttgctcagcccgagtttcctgttaccatggaagcaagaaaatctagagccacagactgggtccttggattggaaggttttgctgtgattccttcatcttcccacctccctgcacttgctgcgtgcactgacccctcacctttcaccacagtgaccaccaggcgactcccgcagaacaagacaagtccaaggggtggtttcagagagagtaaggatacaggagatattgggagcaacccaagtccccagccaggcttggtagcggcaggggcccagggagagggccacaaccaggtagaaaggaggccggaccaatgggcccaagagaggaggaagaggggagtcctggaggaacctggcctgggagctcagggctgggcagcaggtgggatcaggggcctctggaggggcctttgctcctgctggtgcctctgccactatgcctttccccatctccacctctaatccttcctattactggaggcccagctaatatgccacctccttcaggaagtcccctgtgattgccatgaacagtggttcttgccctccctgtagcacctcctgtgctatagatcctggaaaggatctgaccctcctgtgtcctcccagcactttgaacactgtgggggttcagaccaatgcccttcccagcatggatctggcctctctcc

SEQ ID NO: 174 - DNA, 1976 bp, Homo sapiens
gcagaggaggagcgcacgccggcctcgaagaacttctgcttgggtggctgaactctgatcttgacctagagtcatggccatggcaaccaaaggaggtactgtcaaagctgcttcaggattcaatgccatggaagatgcccagaccctgaggaaggccatgaaagggctcggcaccgatgaagacgccattattagcgtccttgcctaccgcaacaccgcccagcgccaggagatcaggacagcctacaagagcaccatcggcagggacttgatagacgacctgaagtcagaactgagtggcaacttcgagcaggtgattgtggggatgatgacgcccacggtgctgtatgacgtgcaagagctgcgaagggccatgaagggagccggcactgatgagggctgcctaattgagatcctggcctcccggacccctgaggagatccggcgcataagccaaacctaccagcagcaatatggacggagccttgaagatgacattcgctctgacacatcgttcatgttccagcgagtgctggtgtctctgtcagctggtgggagggatgaaggaaattatctggacgatgctctcgtgagacaggatgcccaggacctgtatgaggctggagagaagaaatgggggacagatgaggtgaaatttctaactgttctctgttcccggaaccgaaatcacctgttgcatgtgtttgatgaatacaaaaggatatcacagaaggatattgaacagagtattaaatctgaaacatctggtagctttgaagatgctctgctggctatagtaaagtgcatgaggaacaaatctgcatattttgctgaaaagctctataaatcgatgaagggcttgggcaccgatgataacaccctcatcagagtgatggtttctcgagcagaaattgacatgttggatatccgggcacacttcaagagactctatggaaagtctctgtactcgttcatcaagggtgacacatctggagactacaggaaagtactgcttgttctctgtggaggagatgattaaaataaaaatcccagaaggacaggaggattctcaacactttgaatttttttaacttcatttttctacactgctattatcattatctcagaatgcttatttccaattaaaacgcctacagctgcctcctagaatatagactgtctgtattattattcacctataattagtcattatgatgctttaaagctgtacttgcatttcaaagcttataagatataaatggagattttaaagtagaaataaatatgtattccatgtttttaaaagattactttctactttgtgtttcacagacattgaatatattaaattattccatattttcttttcagtgaaaaattttttaaatggaagactgttctaaaatcacttttttccctaatccaatttttagagtggctagtagtttcttcatttgaaattgtaagcatccggtcagtaagaatgcccatccagttttctatatttcatagtcaaagccttgaaagcatctacaaatctctttttttaggttttgtccatagcatcagttgatccttactaagtttttcatgggagacttccttcatcacatcttatgttgaaatcactttctgtagtcaaagtataccaaaaccaatttatctgaactaaattctaaagtatggttatacaaaccatatacatctggttaccaaacataaatgctgaacattccatattattatagttaatgtcttaatccagcttgcaagtgaatggaaaaaaaaataagcttcaaactaggtattctgggaatgatgtaatgctctgaatttagtatgatataaagaaaacttttttgtgctaaaaatactttttaaaatcaattttgttgattgtagtaatttctatttgcactgtgcctttcaactccagaaacattctaagatgtacttggatttaattaaaaagttca

SEQ ID NO: 175 - DNA, 414 bp, Homo sapiens
atgctttaattctaacatacagcccgtaccacatccaggagatgtaaaaagtgtgtttgtgaatgtcttcacttgtactctaattcagacttgccaaagtatttgctatttactattatgggtaatactcttctctggcctagttcttacagagctactaaaatagaaatttacttttatggatagaagtacagaattttgagaagaaactaaattttcaccaaattttaaggaaaaattgtcattatctaaaaatgttcttatatatctgcttcatcttaccttcatactctgaaattccctatagcagacagagctagggaaatattaaaaatttaccctatttattttctggaactaaatcaagccttaactataacattatgagagtaatgggaactactgctggcttta

SEQ ID NO: 176 - DNA, 1098 bp, Homo sapiens
atgtcagccccactggatgccgccctccacgcccttcaggaggagcaggccagaccgccctccacgcccttcaggaggagcaggccagactcaagatgaggctgtgggacctgcagcagctgagaaaggagctcggggactcccccaaagacaaggtcccattttcagtgcccaagatccccctggtattccgaggacacacccagcaggacccggaagtgcctaagtctttagtttccaatttgcggatccactgccctctgcttgcgggctctgctctgatcacctttgatgaccccaaagtggctgagcaggtgctgcaacaaaaggagcacacgatcaacatggaggagtgccggctgcgggtgcaggtccagcccttggagctgcccatggtcaccaccatccaggtgatggtgtccagccagttgagtggccggagggtgttggtcactggatttcctgccagcctcaggctgagtgaggaggagctgctggacaagctagagatcttctttggcaagactaggaacggaggtggcgatgtggacgttcgggagctactgccagggagtgtcatgctggggtttgctagggatggagtggctcagcgtctgtgccaaatcggccagttcacagtgccactgggtgggcagcaagtccctctgagagtctctccgtatgtgaatggggagatccagaaggctgagatcaggtcgcagccagttccccgctcggtactggtgctcaacattcctgatatcttggatggcccggagctgcatgacgtcctggagatccacttccagaagcccacccgcgggggcggggaggtagaggccctgacagtcgtaccccaaggacagcagggcctagcagtcttcacctctgagtcaggctaggggcctccccttctcatcctccccacccccccgccaaggttctcacactggcctgggcttgggtgcccatataggaggtctgtatgttcaccaacagtgcggaggggtcacacattgcaaaacactgcccagaacagtaaaaagagcctgcatgccaaaaaaaaaaaaaaaaaaaaaaaaaaaaaaaaaaaaaaaa

SEQ ID NO: 177 - DNA, 618 bp, Homo sapiens
gcggccgctccgcaggcagagaagccgggagcgtttgaggcggcggcggcacgagcgatggcaggaatagagttggagcggtgccagcagcaggcgaacgaggtgacggaaattatgcgtaacaacttcggcaaggtcctggagcgtggtgtgaagctggccgaactgcagcagcgttcagaccaactcctggatatgagctcaaccttcaacaagactacacagaacctggcccagaagaagtgctgggagaacatccgttaccggatctgcgtggggctggtggtggttggtgtcctgctcatcatcctgattgtgctgctggtcgtctttctccctcagagcagtgacagcagtagtgccccacggacccaggatgcaggcattgcctcagggcctgggaactgacccagctggtcctgaaggagaagcccaatggctgcactggccgattctggtctccaaggaccttggtgtttgctctccctgacccagcccagtgagtgccaaagggcagccccaacatgtgcacccctgcattcccgtcatgcacagacttgcccttgagcaggccgctgtactggccagctgggcaacccccctggagctcataaaaat

SEQ ID NO: 178 - DNA, 1548 bp, Homo sapiens
gctgggctgggctcggcacggggcggggcggagggtggggagcggaaagcaggacgcgcggctcccgcggcccgctggctgcccttcccgccagcgcaggtgtgggacgggcggcggactaggcacagagctgcgggagcaggcacagggagtgtggagcctggcggcgggacggcgggatccggtgggagccggagtcccgccgaggggggctggaggtggaggggcccggcgaggccgcgatgaagccgagcggcgaggaccaggcggcgctggcggccggcccctgggaggagtgcttccaggcggccgtgcagctggcgctgcgggcaggacagatcatcagaaaagcccttactgaggaaaaacgtgtctcaacaaaaacatcagctgcagatcttgtgacagaaacagatcaccttgtggaagatttaattatttctgagttgcgagagaggtttccttcacacaggttcattgcagaagaggccgcggcttctggggccaagtgtgtgctcacccacagcccgacgtggatcatcgaccccatcgacggcacctgcaattttgtgcacagattcccgactgtggcggttagcattggatttgctgttcgacaagagcttgaattcggagtgatttaccactgcacagaggagcggctgtacacgggccggcggggtcggggcgccttctgcaatggccagcggctccgggtctccggggagacagatctctcaaaggccttggttctgacagaaattggccccaaacgtgaccctgcgaccctgaagctgttcctgagtaacatggagcggctgctgcatgccaaggcgcatggggtccgagtgattggaagctccacattggcactctgccacctggcctcaggggccgcggatgcctattaccagtttggcctgcactgctgggatctggcggctgccacagtcatcatcagagaagcaggcggcatcgtgatagacacttcgggtggacccctcgacctcatggcttgcagagtggttgcggccagcacccgggagatggcgatgctcatagctcaggccttacagaccattaactatgggcgggatgatgagaagtgactgcggctgaggcaaagctgctcccaaggcctccctgggctgctgtgggctcctggggaggtggccctcgtggcccacgctccatgccagtggctcacgctctgctcctggctaccccagagggagttgtcacgctacagtgagtggctggccttttaaatcgacgtctctctcaccaggatttggtgtttagctgtttctctctttaatctcacgtagcctttttcaggttagtacgtgttcttctgtcagggccaaaactcaaatctcctgtgaaatacgtattgataatccaatcttgatttttccccccagaatataaatctcaggtaataaggctttagaactgctgataaagcggatcgttctcaggccctccccccggagtacttcagaatgcaataaatcaaaataatgggcaaaaaaaaaaaaaaaaaaa

SEQ ID NO: 179 - DNA, 1040 bp, Homo sapiens
aacacatttcatctgggcttcttaaatctaaatctttaaaatgactaagttttcttccttttctctgtttttcctaatagttggggcttatatgactcatgtgtgtttcaatatggaaattattggagggaaagaagtgtcacctcattccaggccatttatggcctccatccagtatggcggacatcacgtttgtggaggtgttctgattgatccacagtgggtgctgacagcagcccactgccaatatcggtttaccaaaggccagtctcccactgtggttttaggcgcacactctctctcaaagaatgaggcctccaaacaaacactggagatcaaaaaatttataccattctcaagagttacatcagatcctcaatcaaatgatatcatgctggttaagcttcaaacagccgcaaaactcaataaacatgtcaagatgctccacataagatccaaaacctctcttagatctggaaccaaatgcaaggttactggctggggagccaccgatccagattcattaagaccttctgacaccctgcgagaagtcactgttactgtcctaagtcgaaaactttgcaacagccaaagttactacaacggcgacccttttatcaccaaagacatggtctgtgcaggagatgccaaaggccagaaggattcctgtaagggtgactcagggggccccttgatctgtaaaggtgtcttccacgctatagtctctggaggtcatgaatgtggtgttgccacaaagcctggaatctacaccctgttaaccaagaaataccagacttggatcaaaagcaaccttgtcccgcctcatacaaattaagttacaaataattttattggatgcacttgcttcttttttcctaatatgctcgcaggttagagttgggtgtaagtaaagcagagcacatatggggtccatttttgcacttgtaagtcattttattaaggaatcaagttctttttcacttgtatcactgatgtatttctaccatgctggttttattctaaataaaatttagaagact

SEQ ID NO: 180 - DNA, 98 bp, Homo sapiens
ccactggcccactggtggctaggtctccccttatccttctggtccagcgcaaggaggggctgcttctgaggtcggtggctgtctttccattaaagaaa

SEQ ID NO: 181 - DNA, 639 bp, Homo sapiens
ggacggagggcacgagagaaggagacgctgcagaaagaggcctccagcttggtctgtctcccacctctaccagatctgctgagctatgagccaaaccagggatttacagggaggaaaagctttcggactgctgaaggcccagcaggaagagaggctggatgagatcaacaagcaattcctacacgatcccaaatatagcagtgatgaggatctgccctccaaactggaaggcttcaaagagaaatacatggagtttgaccttaatggaaatggcgatattgatatcatgtccttgaaacgaatgctggagaaacttggagtccccaagactcacctagagctaaagaaattaattggagaggtgtccagtggctccggggagacgttcagctaccctgactttctcaggatgatgctgggcaagagatctgccatcctaaaaatgatcctgatgtatgaggaaaaagcgagagaaaggaaaaccaacacgccccccagccaagaaagccctatctgagatgcctgatttgagggaaaagggatgatgggattgaaggggttctaatacccagatatggaaacagaagacaaaatcgtaagccagagtcaacaaattaaataaatttaccccaaaaaaaa

SEQ ID NO: 182 - DNA, 2047 bp, Homo sapiens
gtcgcggctcgagagcgagagtcacgtcccggcgctagcccagcccgacccaggcccaccgtggtgcacgcaaaccacttcctggccatgcgctccctcctgcttctcagcgccttctgcctcctggaggcggccctggccgccgaggtgaagaaacctgcagccgcagcagctcctggcactgcggagaagttgagccccaaggcggccacgcttgccgagcgcagcgccggcctggccttcagcttgtaccaggccatggccaaggaccaggcagtggagaacatcctggtgtcacccgtggtggtggcctcgtcgctggggctcgtgtcgctgggcggcaaggcgaccacggcgtcgcaggccaaggcagtgctgagcgccgagcagctgcgcgacgaggaggtgcacgccggcctgggcgagctgctgcgctcactcagcaactccacggcgcgcaacgtgacctggaagctgggcagccgactgtacggacccagctcagtgagcttcgctgatgacttcgtgcgcagcagcaagcagcactacaactgcgagcactccaagatcaacttccgcgacaagcgcaggccgctgcagtccatcaacgagtgggccgcgcagaccaccgacggcaagctgcccgaggtcaccaaggacgtggagcgcacggacggcgccctgttagtcaacgccatgttcttcaagccacactgggatgagaaattccaccacaagatggtggacaaccgtggcttcatggtgactcggtcctataccgtgggtgtcatgatgatgcaccggacaggcctctacaactactacgacgacgagaaggaaaagctgcaaatcgtggagatgcccctggcccacaagctctccagcctcatcatcctcatgccccatcacgtggagcctctcgagcgccttgaaaagctgctaaccaaagagcagctgaagatctggatggggaagatgcagaagaaggctgttgccatctccttgcccaagggtgtggtggaggtgacccatgacctgcagaaacacctggctgggctgggcctgactgaggccattgacaagaacaaggccgacttgtcacgcatgtcaggcaagaaggacctgtacctggccagcgtgttccacgccaccgcctttgagttggacacagatggcaacccctttgaccaggacatctacgggcgcgaggagctgcgcagccccaagctgttctacgccgaccaccccttcatcttcctagtgcgggacacccaaagcggctccctgctattcattgggcgcctggtccggcctaagggtgacaagatgcgagacgagttatagggcctcagggtgcacacaggatggcaggaggcatccaaaggctcctgagacacatgggtgctattggggttgggggggaggtgaggtaccagccttggatactccatggggtgggggtggaaaagcagaccggggttcccgtgtgcctgagcggaccttcccagctagaattcactccacttggacatgggccccagataccatgatgctgagcccggaaactccacatcctgtgggacctgggccatagtcattctgcctgccctgaaagtcccagatcaagcctgcctcaatcagtattcatatttatagccaggtaccttctcacctgtgagaccaaattgagctaggggggtcagccagccctcttctgacactaaaacacctcagctgcctccccagctctatcccaacctctcccaactataaaactaggtgctgcagcccctgggaccaggcacccccagaatgacctggccgcagtgaggcggattgagaaggagctcccaggaggggcttctgggcagactctggtcaagaagcatcgtgtctggcgttgtggggatgaactttttgttttgtttcttccttttttagttcttcaaagatagggagggaagggggaacatgagcctttgttgctatcaatccaagaacttatttgtacattttttttttcaataaaacttttccaatgacattt

SEQ ID NO: 183 - DNA, 7573 bp, Homo sapiens
ggtattaaaactgatcttttgacatttttgacaatgttcttataaattactttcttttttatcatatatggatgggatgaagcacagagtaagatagagtgcacagcaaaggggatctgcccctcctatctgtccaataccccacaggttttggtgataatcttgggcaatgttccagtcaaacctgcctcccacttctcactaaagttagtgaacatgtgacccacattccccaaataagagcctcttataaactccattcttggctttttcattcatagagatagctattttatgagacatagataaagcattttttagtgatgtgcacgatgccttttttcttaattattaacttctcaaaacataaacacattggaggcacttaataaagggagctgtacgtaccgccgtccgcgcctccaaggtttcacggcttcctcagcagagactcgggctcgtccgccatgtccgccgcagacgaggttgacgggctgggcgtggcccggccgcactatggctctgtcctggataatgaaagacttactgcagaggagatggatgaaaggagacgtcagaacgtggcttatgagtacctttgtcatttggaagaagcgaagaggtggatggaagcatgcctaggggaagatctgcctcccaccacagaactggaggaggggcttaggaatggggtctaccttgccaaactggggaacttcttctctcccaaagtagtgtccctgaaaaaaatctatgatcgagaacagaccagatacaaggcgactggcctccactttagacacactgataatgtgattcagtggttgaatgccatggatgagattggattgcctaagattttttacccagaaactacagatatctatgatcgaaagaacatgccaagatgtatctactgtatccatgcactcagtttgtacctgttcaagctaggcctggcccctcagattcaagacctatatggaaaggttgacttcacagaagaagaaatcaacaacatgaagactgagttggagaagtatggcatccagatgcctgcctttagcaagattgggggcatcttggctaatgaactgtcagtggatgaagccgcattacatgctgctgttattgctattaatgaagctattgaccgtagaattccagccgacacatttgcagctttgaaaaatccgaatgccatgcttgtaaatcttgaagagcccttggcatccacttaccaggatatactttaccaggctaagcaggacaaaatgacaaatgctaaaaacaggacagaaaactcagagagagaaagagatgtttatgaggagctgctcacgcaagctgaaattcaaggcaatataaacaaagtcaatacattttctgcattagcaaatatcgacctggctttagaacaaggagatgcactggccttgttcagggctctgcagtcaccagccctggggcttcgaggactgcagcaacagaatagcgactggtacttgaagcagctcctgagtgataaacagcagaagagacagagtggtcagactgaccccctgcagaaggaggagctgcagtctggagtggatgctgcaaacagtgctgcccagcaatatcagagaagattggcagcagtagcactgattaatgctgcaatccagaagggtgttgctgagaagactgttttggaactgatgaatcccgaagcccagctgccccaggtgtatccatttgccgccgatctctatcagaaggagctggctaccctgcagcgacaaagtcctgaacataatctcacccacccagagctctctgtcgcagtggagatgttgtcatcggtggccctgatcaacagggcattggaatcaggagatgtgaatacagtgtggaagcaattgagcagttcagttactggtcttaccaatattgaggaagaaaactgtcagaggtatctcgatgagttgatgaaactgaaggctcaggcacatgcagagaataatgaattcattacatggaatgatatccaagcttgcgtggaccatgtgaacctggtggtgcaagaggaacatgagaggattttagccattggtttaattaatgaagccctggatgaaggtgatgcccaaaagactctgcaggccctacagattcctgcagctaaacttgagggagtccttgcagaagtggcccagcattaccaagacacgctgattagagcgaagagagagaaagcccaggaaatccaggatgagtcagctgtgttatggttggatgaaattcaaggtggaatctggcagtccaacaaagacacccaagaagcacagaagtttgccttaggaatctttgccattaatgaggcagtagaaagtggtgatgttggcaaaacactgagtgcccttcgctcccctgatgttggcttgtatggagtcatccctgagtgtggtgaaacttaccacagtgatcttgctgaagccaagaagaaaaaactggcagtaggagataataacagcaagtgggtgaagcactgggtaaaaggtggatattattattaccacaatctggagacccaggaaggaggatgggatgaacctccaaattttgtgcaaaattctatgcagctttctcgggaggagatccagagttctatctctggggtgactgccgcatataaccgagaacagctgtggctggccaatgaaggcctgatcaccaggctgcaggctcgctgccgtggatacttagttcgacaggaattccgatccaggatgaatttcctgaagaaacaaatccctgccatcacctgcattcagtcacagtggagaggatacaagcagaagaaggcatatcaagatcggttagcttacctgcgctcccacaaagatgaagttgtaaagattcagtccctggcaaggatgcaccaagctcgaaagcgctatcgagatcgcctgcagtacttccgggaccatataaatgacattatcaaaatccaggcttttattcgggcaaacaaagctcgggatgactacaagactctcatcaatgctgaggatcctcctatggttgtggtccgaaaatttgtccacctgctggaccaaagtgaccaggattttcaggaggagcttgaccttatgaagatgcgggaagaggttatcaccctcattcgttctaaccagcagctggagaatgacctcaatctcatggatatcaaaattggactgctagtgaaaaataagattacgttgcaggatgtggtttcccacagtaaaaaacttaccaaaaaaaataaggaacagttgtctgatatgatgatgataaataaacagaagggaggtctcaaggctttgagcaaggagaagagagagaagttggaagcttaccagcacctgttttatttattgcaaaccaatcccacctatctggccaagctcatttttcagatgccccagaacaagtccaccaagttcatggactctgtaatcttcacactctacaactacgcgtccaaccagcgagaggagtacctgctcctgcggctctttaagacagcactccaagaggaaatcaagtcgaaggtagatcagattcaagagattgtgacaggaaatcctacggttattaaaatggttgtaagtttcaaccgtggtgcccgtggccagaatgccctgagacagatcttggccccagtcgtgaaggaaattatggatgacaaatctctcaacatcaaaactgaccctgtggatatttacaaatcttgggttaatcagatggagtctcagacaggagaggcaagcaaactgccctatgatgtgacccctgagcaggcgctagctcatgaagaagtgaagacacggctagacagctccatcaggaacatgcgggctgtgacagacaagtttctctcagccattgtcagctctgtggacaaaatcccttatgggatgcgcttcattgccaaagtgctgaaggactcgttgcatgagaagttccctgatgctggtgaggatgagctgctgaagattattggtaacttgctttattatcgatacatgaatccagccattgttgctcctgatgcctttgacatcattgacctgtcagcaggaggccagcttaccacagaccaacgccgaaatctgggctccattgcaaaaatgcttcagcatgctgcttccaataagatgtttctgggagataatgcccacttaagcatcattaatgaatatctttcccagtcctaccagaaattcagacggtttttccaaactgcttgtgatgtcccagagcttcaggataaatttaatgtggatgagtactctgatttagtaaccctcaccaaaccagtaatctacatttccattggtgaaatcatcaacacccacactctcctgttggatcaccaggatgccattgctccggagcacaatgatccaatccacgaactgctggacgacctcggcgaggtgcccaccatcgagtccctgataggggaaagctctggcaatttaaatgacccaaataaggaggcactggctaagacggaagtgtctctcaccctgaccaacaagttcgacgtgcctggagatgagaatgcagaaatggatgctcgaaccatcttactgaatacaaaacgtttaattgtggatgtcatccggttccagccaggagagaccttgactgaaatcctagaaacaccagccaccagtgaacaggaagcagaacatcagagagccatgcagagacgtgctatccgtgatgccaaaacacctgacaagatgaaaaagtcaaaatctgtaaaggaagacagcaacctcactcttcaagagaagaaagagaagatccagacaggtttaaagaagctaacagagcttggaaccgtggacccaaagaacaaataccaggaactgatcaacgacattgccagggatattcggaatcagcggaggtaccgacagaggagaaaggccgaactagtgaaactgcaacagacatacgctgctctgaactctaaggccaccttttatggggagcaggtggattactataaaagctatatcaaaacctgcttggataacttagccagcaagggcaaagtctccaaaaagcctagggaaatgaaaggaaagaaaagcaaaaagatttctctgaaatatacagcagcaagactacatgaaaaaggagttcttctggaaattgaggacctgcaagtgaatcagtttaaaaatgttatatttgaaatcagtccaacagaagaagttggagacttcgaagtgaaagccaaattcatgggagttcaaatggagacttttatgttacattatcaggacctgctgcagctacagtatgaaggagttgcagtcatgaaattatttgatagagctaaagtaaatgtcaacctcctgatcttccttctcaacaaaaagttctacgggaagtaattgatcgtttgctgccagcccagaaggatgaaggaaagaagcacctcacagctcctttctaggtccttctttcctcattggaagcaaagacctagccaacaacagcacctcaatctgatacactcccgatgccacatttttaactcctctcgctctgatgggacatttgttacccttttttcatagtgaaattgtgtttcaggcttagtctgacctttctggtttcttcattttcttccattacttaggaaagagtggaaactccactaaaatttctctgtgttgttacagtcttagaggttgcagtactatattgtaagctttggtgtttgtttaattagcaatagggatggtaggattcaaatgtgtgtcatttagaagtggaagctattagcaccaatgacataaatacatacaagacacagaactaaaatgtcatgttattaacagttattaggttgtcatttaaaaataaagttcctttatatttctgtcccatcaggaaaactgaaggatatggggaatcattggttatcttccattgtgtttttctttatggacaggagctaatggaagtgacagtcatgttcaaaggaagcatttctagaaaaaaggagataatgtttttaaatttcattatcaaacttgggcaattctgtttgtgtaactccccgactagtggatgggagagtcccattgctaaaattcagctactcagataaattcagaatgggtcaaggcacctgcctgtttttgttggtgcacagagattgacttgattcagagagacaattcactccatccctatggcagaggaatgggttagccctaatgtagaatgtcattgtttttaaaactgttttatatcttaagagtgccttattaaagtatagatgtatgtcttaaaatgtgggtgataggaattttaaagatttatataatgcatcaaaagccttagaataagaaaagctttttttaaattgctttatctgtatatctgaactcttgaaacttatagctaaaacactaggatttatctgcagtgttgcagggagataattctgccttaaattgtctaaaacaaaaacaaaaccagccaacctatgttacacgtgagattaaaaccaattttttccccattttttctccttttttctcttgctgcccacattgtgcctttattttatgagccccagttttctgggcttagtttaaaaaaaaaatcaagtctaaacattgcatttagaaagcttttgttcttggataaaaagtcatacactttaaaaaaaaaaaaaaaactttttccaggaaaatatattgaaatcatgctgctgagcctctattttctttctttgatgttttgattcagtattcttttatcataaatttttagcatttaaaaattcactgatgtacattaagccaataaactgctttaatgaataacaaactatgtagtgtgtccctattataaatgcattggagaagtatttttatgagactctttactcaggtgcatggttacagccacagggaggcatggagtgccatggaaggattcgccactacccagaccttgttttttgttgtattttggaagacaggttttttaaagaaacattttcctcagattaaaagatgatgctattacaactagcattgcctcaaaaactgggaccaaccaaagtgtgtcaaccctgtttccttaaaagaggctatgaatcccaaaggccacatccaagacaggcaataatgagcagagtttacagctcctttaataaaatgtgtcagtaattttaaggtttatagttccctcaacacaattgctaatgcagaatagtgtaaaatgcgcttcaagaatgttgatgatgatgatatagaattgtggctttagtagcacagaggatgccccaacaaactcatggcgttgaaaccacacagttctcattactgttatttattagctgtagcattctctgtctcctctctctcctcctttgaccttctcctcgaccagccatcatgacatttaccatgaatttacttcctcccaagagtttggactgcccgtcagattgtttctgcacatagttgcctttgtatctctgtatgaaataaaaggtcatttgttc

SEQ ID NO: 184 - DNA, 6250 bp, Homo sapiens
ctctgtcgccgctggagcagctgcggctcggggacccacagacacagccggggtcgggagccgcccggggcagggctcgggagagcgggccacaccatgaggccccagccccaccagaggccccgcgctgccctggcccccggtgcaccgtgctagcccccagccagggcgttggggagggcggtggccatggccagtcacgtggacctgctgacggagctgcagctgctggagaaggtgcccacgctggagcggctgcgggctgcccagaagcgccgggcccagcagctgaagaaatgggcacagtacgagcaggacttgcagcaccgcaagcgaaagcatgagcggaagcgcagcacgggcggccgccgcaagaaagtgtccttcgaggccagcgtggccctgctggaggcctcgctgaggaacgacgccgaggaagtacgctacttcctgaagaataaggtcagccctgatttgtgcaatgaggacggactcacagccctacaccagtgctgcatcgacaactttgaggaaattgtgaagctgctcctctcccatggtgccaatgtgaacgccaaggacaacgagctgtggacacctctccatgctgcagccacctgcggccacatcaacctggtgaagatcctcgttcagtatggggccgacttgcttgctgtcaactcggatgggaacatgccatatgacctctgcgaggatgaacccaccctggatgtcatcgagacctgcatggcataccagggcatcacccaagagaaaatcaacgagatgcgggtggctcctgagcagcagatgattgcggacatccactgcatgatcgcagcgggccaggacctggactggatagatgcccagggtgccacactgctgcacatagctggagccaatggatacctgcgggcagctgagctcctcctggaccatggagtgcgtgtggatgtgaaggactgggatggctgggagcccctgcatgcagctgccttctggggacagatgcagatggcagagctattggtgtcccatggagctagtctcagtgcaaggacatccatggatgagatgccaatagacctgtgcgaggaggaagagttcaaggtcctgctgctggagctaaaacacaagcatgatgtgatcatgaagtcacagctgaggcacaagtcatccttgagccggaggacctccagcgcaggcagccgtgggaaggtggtgcggcgagccagcctgtcggacaggaccaacctgtataggaaggagtatgagggagaggccatcctgtggcagcggagtgcagctgaggatcagcggacctccacctacaacggggacatcagggagaccaggacagaccaagagaataaggaccctaaccccaggctggagaagcccgtgctactctccgaatttcctaccaagatcccacgaggtgaactggacatgcctgttgagaatggcctccgggctccggtcagtgcctaccagtatgcgctggccaacggggatgtctggaaggtgcatgaggtgcctgactacagcatggcctatggcaaccctggcgtggccgacgccaccccgccctggagcagctacaaggaacagagccctcagacgcttctggagctgaagcggcagcgggctgcagccaagctgctcagccaccccttccttagcacacacctgggcagcagcatggccaggacgggcgagagtagcagtgaaggcaaggcccccttgatcggaggcagaacttcaccgtacagcagcaatgggacctcggtatattacacggtcaccagcggagatcccccactcttaaagttcaaggcccccatagaggagatggaggagaaggtgcatggctgttgccgtatctcctagtctccgtgtgatggaggagggagatgcctggggaggggctcctggaatccaggccagcccaacagccctggctggggaggtgtcagggcagctggggagaggtgggctctgcttttcagaggaactcagaccccagccctcagctggctgcccatagcatcccatgtcccacgtcccgtggttctgcttcctgctgcatcgtctgccatctgacacaaggcctgtcgtggcctcctggttcactctgctgtctgatcttgggagggtgggcttgagatcccagctctattcttggtataaaggcttctccggatcagtacatgcatgtcacattaacacacacacacacacacatatacacacacacacaagctcgatcagtgtgtgtaggaatgacatacctgggctcaggggaagcaagggggcttagaatttgtggggtattcccaaaaggatggaagttaagactcagagtctcattaccactgccaatgtggttttagcaggggaggggacctgctaagctgagacccatagtcctgctcagagttatcccaaagtctgagccaccagccacacctgacaggggtgagaagtcctcgctgtgttcagagggagccaggaatctacatgggtagatgagatagacacagacctgctccccgcagccttgttgagagccacacttctgcccatgccaggagccagctgtgtgaccatccaggggtggagggggaaaaccaggcaatttcgttcctggaatcaaccaaatcatgttttcctcttggatggaagtgtcaaaggcagaagggtgtgggagggggacaaggtcagtatttaccaaagtgtatctgattttaaaaattcctttagtctgtaaaactcctagagggagggaggtaactgaattcacttctttttgtggatcgtatcaaggtcactgggttttactggctggtgctgggaaaatgaagctaagtgaggagcttccattggaatgcttttccagggagagaggccagttaatttaaaaaaaacagtcgctagttaacagcgacagagcccagcaccctggggtctttgtgaatatccagactgtttcagcccagcccatctcagccaaccctccttagactgagctgtcagagcaagcaattaggggccagcctgcctccacctcccacccccttccacctccatcagtcatgtgtgcagagtcagtgctcgggatcccgggcccagcttttgcctttttggggatgcttggtgagacagatttgccagtcagcccttttgagttcccgcctcacccaggggctcccagcctgcacttgcaggagtggtgatgccccaagtctgcgaatccagggtgcacgtggtcaatatcccctcctgcattcaggagagccatggtagggctggagttgggtcttgcccagccctgcagtttcatagtcccagccttcctggtgctggggagggaggactgtgaatggctgttctcccctcactgctgagtctcccaggaccccctttggagatgcccatggcatgggcactgcccacaggctcagccagaacctcttggtgtacccgataagctgcaggttatcccttgctctgtgcgccttttatttgtccttaaactacctccttagagctctgaaggggtctcctagttccagattttaatttggggaacagatctgggttctttttaaccctcttctttctcagtctatgagaaacttgccctgaggggcacctgggctaggggcttgggactggaagaccatccccgccttgtgccacaactttggtcatgggatctgctctttgtcattcttagccccctactgtggcccccatagccccataacccagagagggagctggacttcagggagcctgagtgatgctttcccaggagcagggcagctggctggaccagaaagtagagggcccatgggagtgactgcacccttggtggctgctggaaagggagaggttctcagcatcaggccacctccaccccaatgccaggatagatgtattctagagtaggggtggaggcggcccaggaggctgaagacaggtgcacagatgcttcccacgaccttgccatttggggtgggctcttcaacatctcaggctgtggctggaacaggacaggatgatctaaaacacacgtaccattggctgtaaaacagtatgagcccagactgacgctgaaatccctcatgagccaaccttagctacaaggtagggagttctgagggaagccgcgtgctcctcaggagagagctgtttaggttttccgatctttttgctcaggggccaaacactgaaggcacgtactgcccaacccactgagcgcctgaggccattccctccttttccgcatgcctcctgcctcctgggctattcctctccacccagaaggctgggaatcccagctgattccctgacaggagccgacttcacacacaggtgactctcaggcattggctcatgttttcagccagggataaaccatcccttcttggggctttaagtccctggggagctttccctgtaggtctcctgggtgttgagagacaagttggagaccaacctccaatgaatgagccgcggtcattcattaattcactcacgtaatttactgagtagctgcaacatgccagcctctacgttaggttctgcggataaaggaggaataagacagagtcaggagaactgttccttgtggtttccgtcccttggggaccacaggcatcagcagtcccattcaagtcacctgaggcaaagtgtctgcatcttcgtccagcgaccctttgcttttcggctcctagaatccttagagtctgaattcctttagctgggaacagctgtcatggtcacccctggataacatttgccaccaagtatagatgctggatcttgggttccaggcagacatcatccaggtccatctggaactttcagtgatagctgccttcagccagcatctttgggggactctataatagcagcttgagatcagtgtctagaagactgttctgcaatttgctgccaaatgcatctcaggtttttaaagtcattgtttcttgctcatggtggctcatttattacatagtcccctcaccccactaatggataatgggaggaaaagttgctgcttccttcagcatcaaagcctttccttgggaatctgcctccctccatggcaggggtggattcgggagctgggagtaaccaggcaaagtcaaccagatgcctagctcctgctgagacccaggtcctatggcagctcctcattagattaaaggagaccacttccaaagcaggtgctgcatggctcaccatcatatgccccaaacaactgaaagttggcggttatcaccagactgtgagtttctggcaagtagcttggggaagctgaataaactctaggcccagggctactaaagacttcaggatagaattctccatcaaatatacagcataagtaaaactgctctgcactgtttaatccatttccaaggggcttagaaaagctaacaagggtgtgtcccctgtcctgccccaccggtttgctggctttgtaataacataagaccattgtggttgttggtgtcagataccttcccatcctgagctctctcacctacctgctctctctcctagagcaggatactggggtacttttaagaagggtgctccttttaagatgcccagaaaagctgtatttaactcttgctatttgtaacttggggatggtctcccctgccccagggcacataagagcaaaggctccaatggtcagtggatgactctgcaaaagtgaccccctgtgccagaagctatagccctctccccaacaggtctctcttgttggccagagggcctgcttcccatgggcattgcaagtgccaccgtgcggggcctggctctgcacacccaggaaaagtctgcagacccccagccctccgcaataattcaccagaccagaagccactggtgtacagagaacacttaaaaaaatgtattttatgtgaaaaaaaattaaaactctgtatactgtatcagcagctttgtgtaaaaatggcaatcaagagagtctaatatatttaaaacttttttaaaaaaaatcttcgcggatctttgatatcgtactgaggtaacttccacgtagccccttgccacgcggcaccggtgggccttgggtccaaaactgtggctcagccacatcccaaagggggcacatgtccctggagttgcttccagctgccaaggcctgtgacagaattcgctgttaagagtttttaattaaaattattaaattccttttaataac

SEQ ID NO: 185 - DNA, 499 bp, Homo sapiens
ttttgggtgaaggcaaaagtgtttattcaagactttctaccacactgtgggaagcatcgataaacagtcataataattatcattctgagtcactgcaagcgtggggttggatgctggctctcacagtagcctgtgttgggaccatgagcagccatgcgcacctccacgcacggccgagctcaacccgaagaccacgcgtgctccctggcaggagcaggaggcctgaccacagacgcagcagctccccagcctgagcctgggagtgcaccagccagctcgcagcggaggccgtttctcctcacaggctggagtgagctcagagtctagaggtcagaggacctcagactaagagctgcaacagaacgacagcaagaacattctggaaacgatgccacagtgaatcttttatactgtcactcacacttggtgagggcctcagacatgaaaccctggggagaggcgagtgtgacctcagagtttggctgggatgcggctgaga

SEQ ID NO: 186 - DNA, 3802 bp, Homo sapiens
gaattcttagttgttttctttagaagaacatttctagggaataatacaagaagatttaggaatcattgaagttataaatctttggaatgagcaaactcagaatggtgctacttgaagactctggatctgctgacttcagaagacattttgtcaacctgagtcccttcaccattactgtggtcttacttctcagtgcctgttttgtcaccagttctcttggaggaacagacaaggagctgaggctagtggatggtgaaaacaagtgtagcgggagagtggaagtgaaagtccaggaggagtggggaacggtgtgtaataatggctggagcatggaagcggtctctgtgatttgtaaccagctgggatgtccaactgctatcaaagcccctggatgggctaattccagtgcaggttctggacgcatttggatggatcatgtttcttgtcgtgggaatgagtcagctctttgggattgcaaacatgatggatggggaaagcatagtaactgtactcaccaacaagatgctggagtgacctgctcagatggatccaatttggaaatgaggctgacgcgtggagggaatatgtgttctggaagaatagagatcaaattccaaggacggtggggaacagtgtgtgatgataacttcaacatagatcatgcatctgtcatttgtagacaacttgaatgtggaagtgctgtcagtttctctggttcatctaattttggagaaggctctggaccaatctggtttgatgatcttatatgcaacggaaatgagtcagctctctggaactgcaaacatcaaggatggggaaagcataactgtgatcatgctgaggatgctggagtgatttgctcaaagggagcagatctgagcctgagactggtagatggagtcactgaatgttcaggaagattagaagtgagattccaaggagaatgggggacaatatgtgatgacggctgggacagttacgatgctgctgtggcatgcaagcaactgggatgtccaactgccgtcacagccattggtcgagttaacgccagtaagggatttggacacatctggcttgacagcgtttcttgccagggacatgaacctgctgtctggcaatgtaaacaccatgaatggggaaagcattattgcaatcacaatgaagatgctggcgtgacatgttctgatggatcagatctggagctaagacttagaggtggaggcagccgctgtgctgggacagttgaggtggagattcagagactgttagggaaggtgtgtgacagaggctggggactgaaagaagctgatgtggtttgcaggcagctgggatgtggatctgcactcaaaacatcttatcaagtgtactccaaaatccaggcaacaaacacatggctgtttctaagtagctgtaacggaaatgaaacttctctttgggactgcaagaactggcaatggggtggacttacctgtgatcactatgaagaagccaaaattacctgctcagcccacagggaacccagactggttggaggggacattccctgttctggacgtgttgaagtgaagcatggtgacacgtggggctccatctgtgattcggacttctctctggaagctgccagcgttctatgcagggaattacagtgtggcacagttgtctctatcctggggggagctcactttggagagggaaatggacagatctgggctgaagaattccagtgtgagggacatgagtcccatctttcactctgcccagtagcaccccgcccagaaggaacttgtagccacagcagggatgttggagtagtctgctcaagtaagacccagaaaacatctttaattggttcttatactgtgaaagggacagggttagggagtcatagctgtctttttctaaagccctgtctccttccaggatacacagaaattcgcttggtgaatggcaagaccccgtgtgagggcagagtggagctcaaaacgcttggtgcctggggatccctctgtaactctcactgggacatagaagatgcccatgttctttgccagcagcttaaatgtggagttgccctttctaccccaggaggagcacgttttggaaaaggaaatggtcagatctggaggcatatgtttcactgcactgggactgagcagcacatgggagattgtcctgtaactgctctaggtgcttcattatgtccttcagagcaagtggcctctgtaatctgctcaggaaaccagtcccaaacactgtcctcgtgcaattcatcgtctttgggcccaacaaggcctaccattccagaagaaagtgctgtggcctgcatagagagtggtcaacttcgcctggtaaatggaggaggtcgctgtgctgggagagtagagatctatcatgagggctcctggggcaccatctgtgatgacagctgggacctgagtgatgcccacgtggtttgcagacagctgggctgtggagaggccattaatgccactggttctgctcattttggggaaggaacagggcccatctggctggatgagatgaaatgcaatggaaaagaatcccgcatttggcagtgccattcacacggctgggggcagcaaaattgcaggcacaaggaggatgcgggagttatctgctcagaattcatgtctctgagactgaccagtgaagccagcagagaggcctgtgcagggcgtctggaagttttttacaatggagcttggggcactgttggcaagagtagcatgtctgaaaccactgtgggtgtggtgtgcaggcagctgggctgtgcagacaaagggaaaatcaaccctgcatctttagacaaggccatgtccattcccatgtgggtggacaatgttcagtgtccaaaaggacctgacacgctgtggcagtgcccatcatctccatgggagaagagactggccagcccctcggaggagacctggatcacatgtgacaacaagataagacttcaggaaggacccacttcctgttctggacgtgtggagatctggcatggaggttcctgggggacagtgtgtgatgactcttgggacttggacgatgctcaggtggtgtgtcaacaacttggctgtggtccagctttgaaagcattcaaagaagcagagtttggtcaggggactggaccgatatggctcaatgaagtgaagtgcaaagggaatgagtcttccttgtgggattgtcctgccagacgctggggccatagtgagtgtgggcacaaggaagacgctgcagtgaattgcacagatatttcagtgcagaaaaccccacaaaaagccacaacaggtcgctcatcccgtcagtcatcctttattgcagtcgggatccttggggttgttctgttggccattttcgtcgcattattcttcttgactaaaaagcgaagacagagacagcggcttgcagtttcctcaagaggagagaacttagtccaccaaattcaataccgggagatgaattcttgcctgaatgcagatgatctggacctaatgaattcctcaggaggccattctgagccacactgaaaaggaaaatgggaatttataacccagtgagttcagcctttaagataccttgatgaagacctggactattgaatggagcagaaattcacctctctcactgactattacagttgcatttttatggagttcttcttctcctaggattcctaagactgctgctgaatttataaaaattaagtttgtgaatgtgactacttagtggtgtatatgagactttcaagggaattaaataaataaataagaatgttaaa

SEQ ID NO: 187 - DNA, 3062 bp, Homo sapiens
gacaagagctcagacctgaggagagtgactagcttctctgtgtcccaggtggccaccttccactgtggaagctcatggactccattgggtcttcagggttgcggcagggggaagaaaccctgagttgctctgaggagggcttgcccgggccctcagacagctcagagctggtgcaggagtgcctgcagcagttcaaggtgacaagggcacagctacagcagatccaagccagcctcttgggttccatggagcaggcgctgaggggacaggccagccctgcccctgcggtccggatgctgcctacatacgtggggtccaccccacatggcactgagcaaggagacttcgtggtgctggagctgggggccacaggggcctcactgcgtgttttgtgggtgactctaactggcattgaggggcatagggtggagcccagaagccaggagtttgtgatcccccaagaggtgatgctgggtgctggccagcagctctttgactttgctgcccactgcctgtctgagttcctggatgcgcagcctgtgaacaaacagggtctgcagcttggcttcagcttctctttcccttgtcaccagacgggcttggacaggagcaccctcatttcctggaccaaaggttttaggtgcagtggtgtggaaggccaggatgtggtccagctgctgagagatgccattcggaggcagggggcctacaacatcgacgtggttgctgtggtgaacgacacagtgggcaccatgatgggctgtgagccgggggtcaggccgtgtgaggttgggctagttgtagacacgggcaccaacgcgtgttacatggaggaggcacggcatgtggcagtgctggacgaagaccggggccgcgtctgcgtcagcgtcgagtggggctccttaagcgatgatggggcgctgggaccagtgctgaccaccttcgaccataccctggaccatgagtccctgaatcctggtgctcagaggtttgagaagatgatcggaggcctgtacctgggtgagctggtgcggctggtgctggctcacttggcccggtgtggggtcctctttggtggctgcacctcccctgccctgctgagccaaggcagcatcctcctggaacacgtggctgagatggaggacccctctactggggcagcccgtgtccatgctatcctgcaggacttgggcctgagccctggggcttcggatgttgagcttgtgcagcacgtctgtgcggccgtgtgcacgcgggctgcccagctctgtgctgccgccctggccgctgttctctcctgcctccagcacagccgggagcaacaaacactccaggttgctgtggccaccggaggccgagtgtgtgagcggcaccccaggttctgcagcgtcctgcaggggacagtgatgctcctggccccggaatgcgatgtctccttaatcccctctgtggatggtggtggccggggagtggcgatggtgactgctgtggctgcccgtctggctgcccaccggcgcctgctggaggagaccctggccccattccggttgaaccatgatcaactggctgcggttcaggcacagatgcggaaggccatggccaaggggctccgaggggaggcctcctcccttcgcatgctgcccactttcgtccgggccacccctgacggcagcgagcgaggggatttcctggccctggacctcgggggcacgaacttccgtgtcctcctggtacgtgtgaccacaggcgtgcagatcaccagcgagatctactccattcccgagactgtggcccagggttctgggcagcagctctttgaccacatcgtggactgcatcgtggacttccagcagaagcagggcctgagcgggcagagcctcccactgggttttaccttctccttcccatgtaggcagcttggcctagaccagggcatcctcctgaactggaccaagggtttcaaggcatcagactgcgagggccaagatgtcgtgagtctgttgcgggaagccatcactcgcagacaggcagtggagctgaatgtggttgccattgtcaatgacacggtggggaccatgatgtcctgtggctatgaggacccccgttgcgagataggcctcattgtcggaaccggcaccaatgcctgctacatggaggagctccggaatgtggcgggcgtgcctggggactcaggccgcatgtgcatcaacatggagtggggcgcctttggggacgatggctctctggccatgctcagcacccgctttgatgcaagtgtggaccaggcgtccatcaaccccggcaagcagaggtttgaaaagatgatcagcggcatgtacctgggggagatcgtccgccacatccttttacatttaaccagccttggcgttctcttccggggccagcagatccagcgccttcagaccagggacatcttcaagaccaagttcctctctgagatcgaaagtgacagcctggccctgcggcaggtccgagccatcctagaggatctggggctacccctgacctcagatgacgccctgatggtgctagaggtgtgccaggctgtgtcccagagggctgcccagctctgtggggcgggtgtagctgccgtggtggagaagatccgggggaaccggggcctggaagagctggcagtgtctgtgggggtggatggaacgctctacaagctgcacccgcgcttctccagcctggtggcggccacagtgcgggagctggcccctcgctgtgtggtcacgttcctgcagtcagaggatgggtccggcaaaggtgcggccctggtcaccgctgttgcctgccgccttgcgcagttgactcgtgtctgaggaaacctccaggctgaggaggtctccgccgcagccttgctggagccgggtcggggtctgcctgtttcccagccaggcccagccacccaggactcctgggacatcccatgtgtgacccctctgcggccatttggccttgctccctggctttccctgagagaagtagcactcaggttagcaatatatatatataatttatttacaaaaaaaaaaaaa

SEQ ID NO: 188 - DNA, 6210 bp, Homo sapiens
gcaggaacagtgctagtattgctcgagcccgagggctggaggttaggggatgaaggtctgcttccacgctttgcactgaattagggctagaattggggatgggggtaggggcgcattccttcgggagccgaggcttaagtcctcggggtcctgtactcgatgccgtttctcctatctctgagcctcagaactgtcttcagtttccgtacaagggtaaaaaggcgctctctgccccatcccccccgacctcgggaacaagggtccgcattgaaccaggtgcgaatgttctctctcattctgcgccgttcccgcctcccctcccccagccgcggcccccgcctccccccgcactgcaccctcggtgttggctgcagcccgcgagcagttcccgtcaatccctccccccttacacaggatgtccatattaggacatctgcgtcagcaggtttccacggcctttccctgtagccctggggggagccatccccgaaacccctcatcttggggggcccacgagacctctgagacaggaactgcgaaatgctcacgagattaggacacgcgccaaggcgggggcagggagctgcgagcgctggggacgcagccgggcggccgcagaagcgcccaggcccgcgcgccacccctctggcgccaccgtggttgagcccgtgacgtttacactcattcataaaacgcttgttataaaagcagtggctgcggcgcctcgtactccaaccgcatctgcagcgagcaactgagaagccaagactgagccggcggccgcggcgcagcgaacgagcagtgaccgtgctcctacccagctctgcttcacagcgcccacctgtctccgcccctcggcccctcgcccggctttgcctaaccgccacgatgatgttctcgggcttcaacgcagactacgaggcgtcatcctcccgctgcagcagcgcgtccccggccggggatagcctctcttactaccactcacccgcagactccttctccagcatgggctcgcctgtcaacgcgcaggtaaggctggcttcccgtcgccgcggggccgggggcttggggtcgcggaggaggagacaccgggcgggacgctccagtagatgagtagggggctcccttgtgcctggagggaggctgccgtggccggagcggtgccggctcgggggctcgggacttgctctgagcgcacgcacgcttgccatagtaagaattggttcccccttcgggaggcaggttcgttctgagcaacctctggtctgcactccaggacggatctctgacattagctggagcagacgtgtcccaagcacaaactcgctaactagagcctggcttcttcggggaggtggcagaaagcggcaatcccccctcccccggcagcctggagcacggaggagggatgagggaggagggtgcagcgggcgggtgtgtaaggcagtttcattgataaaaagcgagttcattctggagactccggagcggcgcctgcgtcagcgcagacgtcagggatatttataacaaaccccctttcaagcaagtgatgctgaagggataacgggaacgcagcggcaggatggaagagacaggcactgcgctgcggaatgcctgggaggaaaagggggagacctttcatccaggatgagggacatttaagatgaaatgtccgtggcaggatcgtttctcttcactgctgcatgcggcactgggaactcgccccacctgtgtccggaacctgctcgctcacgtcggctttccccttctgttttgttctaggacttctgcacggacctggccgtctccagtgccaacttcattcccacggtcactgccatctcgaccagtccggacctgcagtggctggtgcagcccgccctcgtctcctctgtggccccatcgcagaccagagcccctcaccctttcggagtccccgccccctccgctggggcttactccagggctggcgttgtgaagaccatgacaggaggccgagcgcagagcattggcaggaggggcaaggtggaacaggtgaggaactctagcgtactcttcctgggaatgtgggggctgggtgggaagcagccccggagatgcaggagcccagtacagaggatgaagccactgatggggctggctgcacatccgtaactgggagccctggctccaagcccattccatcccaactcagactctgagtctcaccctaagaagtactctcatagtttcttccctaagtttcttaccgcatgctttcagactgggctcttctttgttctcttgctgaggatcttattttaaatgcaagtcacacctattctgcaactgcaggtcagaaatggtttcacagtggggtgccaggaagcagggaagctgcaggagccagttctactggggtgggtgaatggaggtgatggcagacacttttactgaatgtcggtctttttttgtgattattctagttatctccagaagaagaagagaaaaggagaatccgaagggaaaggaataagatggctgcagccaaatgccgcaaccggaggagggagctgactgatacactccaagcggtaggtactctgtgggttgctcctttttaaaacttaagggaaagttggagattgagcataagggcccttgagtaagactgtgtcttatgctttcctttatccctctgtatacaggagacagaccaactagaagatgagaagtctgctttgcagaccgagattgccaacctgctgaaggagaaggaaaaactagagttcatcctggcagctcaccgacctgcctgcaagatccctgatgacctgggcttcccagaagagatgtctgtggcttcccttgatctgactgggggcctgccagaggttgccaccccggagtctgaggaggccttcaccctgcctctcctcaatgaccctgagcccaagccctcagtggaacctgtcaagagcatcagcagcatggagctgaagaccgagccctttgatgacttcctgttcccagcatcatccaggcccagtggctctgagacagcccgctccgtgccagacatggacctatctgggtccttctatgcagcagactgggagcctctgcacagtggctccctggggatggggcccatggccacagagctggagcccctgtgcactccggtggtcacctgtactcccagctgcactgcttacacgtcttccttcgtcttcacctaccccgaggctgactccttccccagctgtgcagctgcccaccgcaagggcagcagcagcaatgagccttcctctgactcgctcagctcacccacgctgctggccctgtgagggggcagggaaggggaggcagccggcacccacaagtgccactgcccgagctggtgcattacagagaggagaaacacatcttccctagagggttcctgtagacctagggaggaccttatctgtgcgtgaaacacaccaggctgtgggcctcaaggacttgaaagcatccatgtgtggactcaagtccttacctcttccggagatgtagcaaaacgcatggagtgtgtattgttcccagtgacacttcagagagctggtagttagtagcatgttgagccaggcctgggtctgtgtctcttttctctttctccttagtcttctcatagcattaactaatctattgggttcattattggaattaacctggtgctggatattttcaaattgtatctagtgcagctgattttaacaataactactgtgttcctggcaatagtgtgttctgattagaaatgaccaatattatactaagaaaagatacgactttattttctggtagatagaaataaatagctatatccatgtactgtagtttttcttcaacatcaatgttcattgtaatgttactgatcatgcattgttgaggtggtctgaatgttctgacattaacagttttccatgaaaacgttttattgtgtttttaatttatttattaagatggattctcagatatttatatttttattttatttttttctaccttgaggtcttttgacatgtggaaagtgaatttgaatgaaaaatttaagcattgtttgcttattgttccaagacattgtcaataaaagcatttaagttgaatgcgaccaaccttgtgctcttttcattctggaagtcttgtaagtttctgaaaggtattattggagaccagtttgtcaagaagggtagctgctggagggggacacaccctctgtctgatcccttatcaaagaggacaaggaaactatagagctgattttagaatattttacaaatacatgccttccattggaatgctaagattttctactgcttctggggacgggaaaccgctgtgtaacagcttttgtgggaatacattttttctgtttcagtactcgcagggggaaatatttaaattttgttgtgctaatattaaattcagatgttttgatcttaaaggaaccctttaagcaaacagaacctagctttgtacagactattttaactttttattctcacaaaatcacgtggagggttattctacttcaaagatgagcaaattgaagaatggttagaataaacaactttcttgatattccgttatcggcattagaatcttcctgctcgttatcgtatccagcaggctgaactgcctcttgatacttggttaaaaaaaattttcaggccgggcgcggtggcccatgcctgtaatcctagcactttgggaggccgaggcaggcggatcacctgaggtcgggagttcgagaccagcctgaccaacatggagaaaccccgtctttactaaaaatacaaaattagcctggtgtggtggtgcatgcctgtaatcctagctacttgagaggctgagacaggaaaatcacttgaactcgggaggcggatgttgcagcgaactgagattgcgccattgcactccagcctgggcaacaagattgaaactctgtttaaaaaaaaaagttttcactaatgtgtacatttttttgtactcttttattctcgaaagggaaggagggctattgccctatcccttattaataaatgcattgtggtttctggtttctctaataccatatgcccttcattcagtttatagtgggcggaagtgggggagaaaaagttgctcagaaatcaaaagatatctcaaacagcacaaataatggctgatcgttctgcaaacaaaaagttacataatagctcaagaaggagaagtcaacatgactctgaacaagctttaacttagaaactttatcatcttaaggaagaacgtgacctttgtccaggacgtctctggtaatggggcacttacacacacatgcacacgtacaaaccacagggaaaggagaccgcccttctgcctctgctcgcgagtatcacgcaggcaccatgcactatgttttcacacacactgggtggaagaagagcttcagcgccagtcttctaatgctttggtgataatgaaaatcactgggtgcttatggggtgtcatattcaatcgagttaaaagttttaattcaaaatgacagttttactgaggttgatgttctcgtctatgatatctctgcccctcccataaaaatggacatttaaaagcaacttaccgctctttagatcactcctatatcacacaccacttggggtgctgtttctgctagacttgtgatgacagtggccttaggatccctgtttgctgttcaaagggcaaatattttatagcctttaaatatacctaaactaaatacagaattaatataactaacaaacacctggtctgaaataacaaggtgatctaccctggaaggaacccagctggtgggccaggagcggtggctcacacctgtaattccagcactttgggaggctgagacaggaggatcactggagtccaggagtttgagaccagcctgggcaacatggcaaaacccagtgtgcttctgttgtcccagctacactactcaggaggctgaggcaggagtatgacttgagcctgggagggggaggttgcagagaactgatattgcaccaccactgcactccagcctgggtgacacagcaaaaccctatctcaaaaaaaaaaaaaaaaaaaaggaacccagctggttcctgtaggtgtgcaataataacaaccagaggaagaaaaggaagacgatttcccagatgaagaagggcagctggaccttcggac

SEQ ID NO: 189 - DNA, 2285 bp, Homo sapiens
tgccttccttgctgagctgcttcgcgtacgtttgaggaaggtctagtgaaattggtctttccattacatctggatgtactaccagagagttctgctgctgttgttttttttaagcttttctttctttgagtctttaaagggcaattgtcgacactctgcaaacataccgatttgttgtctgcccactttggagtcttcaatctgggcagtaactatttaccctttttcctgctagcctgtccccctctctggattgaagtcacctgctaagacaatggactaccgaccagactcccggaaatcatgttggtaggatcccagtctttttcgcctggaggcgccaatgggatcattagaagccagtcctttgcgggtttcagcggcctccaggaaaggcgatccaggtgtaactccttcattgaaaattcctccgctctcaagaagcctcaggcaaactgaagaaaatgcacaatttaggccacaaaaacaacaatccccccaaagagcctcagcctaaaagggtggaagaagtctacagggccttgaaaaatggacttgatgaatatctggaggttcaccagacggagctggacaagttgacagctcagttaaaagatatgaaaagaaactctcgcctgggtgtactgtatgacctagacaagcaaattaaaacaattgaaagatacatgagacgcctggagtttcatataagtaaggtagatgaactctatgaagcttattgtatccagcgacgcctccaggatggtgccagcaaaatgaagcaagccttcgcaacatcccctgccagcaaagctgcccgggagagtctgacagagatcaatcggagcttcaaggagtacacagagaatatgtgcaccattgaagtggagctagagaatctgctgggagaattctccatcaagatgaaaggtctggctggctttgcacgcctctgtcctggagatcaatatgaaattttcatgaagtatggccggcagcggtggaaactgaaaggcaaaatagaagtaaatggcaagcagagctgggatggagaagaaacagtttttctgcccctgatagttgggttcatctccatcaaggtcacggagctcaaagggctagcaactcacatcctggtaggtagcgtgacctgtgagaccaaagagctgtttgcagcccgacctcaggtagtggctgtcgacatcaatgaccttggtaccatcaaactgaacctggaaatcacctggtatccatttgacgtggaggacatgaccgcatcctcaggcgctgggaacaaggcagcagcccttcagaggagaatgtccatgtacagccagggtaccccggaaacgcccaccttcaaagaccactccttcttttcaaatctacctgatgacatctttgaaaatggaaaggcagccgaggagaaaatgccactgtcgctcagcttcagtgacctgccaacggactgcgccctcacctcccactcaacaggctccccttccaactcaacaaatccagaaattaccatcacccctgcggagtttaacctcagcagcttggcctcccagaatgagggtatggatgacaccagctcagcatcttccaggaactccctgggagaaggccaagagccaaagtcacacctgaaggaggaagacccagaggagcccagaaaacctgcctcggccccatctgaggcttgccgccgacagtcctcaggtgctggggctgagcacctgttccttgagaatgatgttgcagaagcacttctgcaagagtctgaggaggcctctgagctcaagcctgtggaactggacacttcggaaggaaacatcacaaagcagctggtcaagaggctcacatctgcagaggtgccaatggccacagacaggctgctctctgagggttctgttggtggagaatctgaaggctgcagatcctttctagatggaagcttagaggatgcttttaatgggcttttacttgcattagaaccacataaagagcagtataaagagtttcaggatctgaaccaagaagtcatgaatttggatgatattctaaaaaagtagagaagattcctctaatggatcccagtgtgcccatccctcaacctcctcagtgatcaactcatggccaatcttgtttcctattcttcaacctgctgacttccctctggattcttctgcaaccagtcccagatattgtgccattttatccatggttgtacttcttttttggatataaagatttttaaatgcattttttaaatgctgcggccg

SEQ ID NO: 190 - DNA, 902 bp, Homo sapiens
atggaggcctgcgtgtcttcactgctggtgctggccctgggggccctgtcagtaggcagctcctttgggacccagatcatcgggggccgggaggtgatcccccactcgcgcccgtacatggcctcactgcagagaaatggctcccacctgtgcgggggtgtcctggtgcacccaaagtgggtgctgacggctgcccactgcctggcccagcggatggcccagctgaggctggtgctggggctccacaccctggacagccccggtctcaccttccacatcaaggcagccatccagcaccctcgctacaagcccgtccctgccctggagaacgacctcgcgctgcttcagctggacgggaaagtgaagcccagccggaccatccggccgttggccctgcccagtaagcgccaggtggtggcagcagggactcggtgcagcatggccggctgggggctgacccaccagggcgggcgcctgtcccgggtgctgcgggagctggacctccaagtgctggacacccgcatgtgtaacaacagccgcttctggaacggcagcctctcccccagcatggtctgcctggcggccgactccaaggaccaggctccctgcaagggtgactcgggcgggcccctggtgtgtggcaaaggccgggtgttggccggagtcctgtccttcagctccagggtctgcactgacatcttcaagcctcccgtggccaccgctgtggcgccttacgtgtcctggatcaggaaggtcaccggccgatcggcctgatgccctggggtgatggggaccccctcgctgtctccacaggacccttcccctccaggggtgcagtggggtgggtgaggacgggtgggagggacagggagggaccaataaatcataatgaagaaacgctc

SEQ ID NO: 191 - DNA, 2304 bp, Homo sapiens
gaattcgtccaaactgaggatcacaagtctccacattctgagtaggaggatgagggtctgagttaggatttgggtcctgcagggcttgctaaggaatcccctgatggcctaggattccacgcagagcacatctggtgtgagagagctcgctgcaagggtgaaggctccgccctatcagatagacaaccaggccaccaagaggcccagccctccaaaccctggatttgcaacatcctcaaagaacagcaacgggccttgagcagaattgagaaggaaatacccccacctgccctcagccgttaagtgggctttgctattcacaagggcctctgggtgtcctggcagagaggggagatggcacaggcaccaggtgctagggtgccagggcctcccgagaaggaacaggtgcaaagcaggcaattagcccagaaggtatccgtggggcaggcagcctagatctgatgggggaagccaccaggattacatcatctgctgtaacaactgctctgaaaagaagatatttttcaacctgaacttgcagtagctagtggagaggcaggaaaaaggaaatgaaacagagacagagggaagcctgagccaaaatagaccttcccgagagaggaggaagcccggagagagacgcacggtcccctccccgcccctaggccgccgccccctctctgccctcggcggcgagcagggcgccgcgacccggggccggaaaggtgccaggggctccgggcggccgggcgggcgcacaccatccccgcgggcggcgcggagccggcgacagcgcgcgagagggaccgggcggtggcggcggcgggaccgggatggaagggagcgcggtgactgtccttgagcgcggaggggcgagctcgccggcggaggccgagcaagcggaggcaggagcggcggcgacggcggcggcggcggcggcgcccgagcacccgagggggtccgagccccggcagccggccagccccgcgccacaaagggagcgcccccgccgcccggcaccccgcctccctccccaatgtcctcggccatcgaaaggaagagcctggacccttcagaggaaccagtggatgaggtgctgcagatccccccatccctgctgacatgcggcggctgccagcagaacatcggggaccgctacttcctgaaggccatcgaccagtactggcacgaggactgcctgagctgcgacctctgtggctgccggctgggtgaggtggggcggcgcctctactacaaactgggccggaagctctgccggagagactatctcaggctttttgggcaagacggtctctgcgcatcctgtgacaagcggattcgtgcctatgagatgacaatgcgggtgaaagacaaagtgtatcacctggaatgtttcaagtgcgccgcctgtcagaagcatttctgtgtaggtgacagatacctcctcatcaactctgacatagtgtgcgaacaggacatctacgagtggactaagatcaatgggatgatataggcccgagtccccgggcatctttggggaggtgttcactgaagacgccgtctccatggcatcttcgtcttcactcttaggcactttgggggtttgagggtggggtaagggatttcttaggggatggtagacctttattgggtatcaagacatagcatccaagtggcataattcaggggctgacacttcaaggtgacagaaggaccagcccttgagggagaacttatggccacagcccatccatagtaactgacatgattagcagaagaaaggaacatttaggggcaagcaggcgctgtgctatcatgatggaatttcatatctacagatagagagttgttgtgtacagacttgttgtgactttgacgcttgcgaactagagatgtgcaattgatttcttttcttcctggctttttaactcccctgtttcaatcactgtcctccacacaagggaaggacagaaaggagagtggccattctttttttcttggcccccttcccaaggccttaagctttggacccaagggaaaactgcatggagacgcatttcggttgagaatggaaaccacaacttttaaccaaacaattatttaaagcaatgctgatgaatcactgtttttagacaccttcattttgaggggaggagttccacagattgtttctatacaaatataaatcttaaaaagttgttcaactattttattatcctagattatatcaaagtatttgtcgtgtgtagaaaaaaaaaacagctctgcaggcttaataaaaatgacagactgaaaaaaaaaaaa

SEQ ID NO: 192 - DNA, 4343 bp, Homo sapiens
cgcacctgctgcaggtgctcccggccgccccggaccagcgagcgcgggcactgcggcggggaggatgctgcgcgagcggaccgtgcggctgcagtacgggagccgcgtggaggcggtgtacgtgctgggcacctacctctggaccgatgtctacagcgcggccccagccggggcccaaaccttcagcctgaagcactcggaacacgtgtgggtggaggtggtgcgtgatggggaggctgaggaggtggccaccaatggcaagcagcgctggcttctctcgcccagcaccaccctgcgggtcaccatgagccaggcgagcaccgaggccagcagtgacaaggtcaccgtcaactactatgacgaggaagggagcattcccatcgaccaggcggggctcttcctcacagccattgagatctccctggatgtggacgcagaccgggatggtgtggtggagaagaacaacccaaagaaggcatcctggacctggggccccgagggccagggggccatcctgctggtgaactgtgaccgagagacaccctggttgcccaaggaggactgccgtgatgagaaggtctacagcaaggaagatctcaaggacatgtcccagatgatcctgcggaccaaaggccccgaccgcctccccgccggatacgagatagttctgtacatttccatgtcagactcagacaaagtgggcgtgttctacgtggagaacccgttcttcggccaacgctatatccacatcctgggccggcggaagctctaccatgtggtcaagtacacgggtggctccgcggagctgctgttcttcgtggaaggcctctgtttccccgacgagggcttctcaggcctggtctccatccatgtcagcctgctggagtacatggcccaggacattcccctgactcccatcttcacggacaccgtgatattccggattgctccgtggatcatgacccccaacatcctgcctcccgtgtcggtgtttgtgtgctgcatgaaggataattacctgttcctgaaagaggtgaagaaccttgtggagaaaaccaactgtgagctgaaggtctgcttccagtacctaaaccgaggcgatcgctggatccaggatgaaattgagtttggctacatcgaggccccccataaaggcttccccgtggtgctggactctccccgagatggaaacctaaaggacttccctgtgaaggagctcctgggcccagattttggctacgtgacccgggagcccctctttgagtctgtcaccagccttgactcatttggaaacctggaggtcagtcccccagtgaccgtgaacggcaagacatacccgcttggccgcatcctcatcgggagcagctttcctctgtctggtggtcggaggatgaccaaggtggtgcgtgacttcctgaaggcccagcaggtgcaggcacccgtggagctctactcagactggctgactgtgggccacgtggatgagttcatgtcctttgtccccatccccggcacaaagaaattcctgctactcatggccagcacctcggcctgctacaagctcttccgagagaagcagaaggacggccatggagaggccatcatgttcaaaggcttgggtgggatgagcagcaagcgaatcaccatcaacaagattctgtccaacgagagccttgtgcaggagaacctgtacttccagcgctgcctagactggaaccgtgacatcctcaagaaggagctgggactgacagagcaggacatcattgacctgcccgctctgttcaagatggacgaggaccaccgtgccagagccttcttcccaaacatggtgaacatgatcgtgctggacaaggacctgggcatccccaagccattcgggccacaggttgaggaggaatgctgcctggagatgcacgtgcgtggcctcctggagcccctgggcctcgaatgcaccttcatcgacgacatttctgcctaccacaaatttctgggggaagtccactgtggcaccaacgtccgcaggaagcccttcaccttcaagtggtggcacatggtgccctgacctgccaggggccctggcgtttgcctccttcgcttagttctccagaccctccctcacacgcccagagccttctgctgacatggactggacagccccgctgggagacctttgggacgtggggtggaatttggggtatctgtgccttgccctccctgagaggggcctcagtgtcctctgaagccatccccagtgagcctcgactctgtccctgctgaaaatagctgggccagtgtctctgtagccctgacataaggaacagaacacaacaaaacacagcaaaccatgtgcccaaactgctccccaaagaattttgagtctctaatctgacactgaatgaggggagaagggaaggagattctgggattgccagttcttccagcagccatgctctgaaaatcaaggtagaatccatggaaagggaccccaggaccccgggaccctagacgtatcttgaactgccatcgtcatttcaaatacatctccctcagggtttccaggtggccacccccaattattcattccttaccaacctctcaaatcctcttggctttctctctgcagtgtggacactgttggctagtcctccccactccctgagggtccagtaagttagcttagaaccttcctggaaacatttcatctgagcaggtttccccacgtgtgggatgctccttttgcctcatctgtctcagggatgcaggctcccccgcatgcatggggatttctccccagaccagcatacttgtgacctgagagttcaatgcgtaaagatgcccctggtcagccatatccatcttctcttgcctggtccttgattctctggccgctccctgaccttcctccttccactgccttgactttcttcctttttattcctggtgccatctgtccaggcagctagacaagaacttgttcgccagcagccagattcaggccttcccaggggcataataagtgaccagcccctcctctccggacatcagatccaacacataaggaccctggcctaccctccagcccaacagccagttctgggtcagctgccaacttaggggtggtttgattatcccattgaaattcaccagtgcctttgccaaagaccctctcatttggacatacccagattcattccctggctccaactgaaaagactcagtttcaatcgttaaaagttcctttagggccagaagaataaatgaattataatcccattttgaagaaccgatttataaccaatgaaaaggttataatgtaatttatattcttggaggaacaagattttcatttgggattatttccttcaaccattcaacaaacatttgttgtatgccactaagcgccaggcacggcgttgggctctgcaaacacagtggttagtagcagtctggacctggtccctactggcatggaacccatcactccccaacatgcaaagcccacatttaaaggccagcctctgccccttcagtgatgcgctctttagaaatgccagcccactatattcagaaatccgcagggcacaaaacttccagcaagtcactgttgtggtgaaatgggcagtgggggtggggggtcttctttaaacaggcccccttcccatctacctagccagtacccatccaatgagtccccagagcctccagaagctgttgtctcctctctggggacagcagctcctgcctttggaggccaaagccccagatctctccagccccagagctgaaaacaccaagtgcctatttgagggtgtctgtctggagacttagagtttgtcatgtgtgtgtgtgtgtttggttaatgtgggtttatgggttttctttctttttttttttttttttttagtctacattagggggaagtgagcgcctcccatgtgcagacagtgtgtctttatagatttttctaaggctttccccaatgatgtcggtaatttctgatgtttctgaagttcccaggactcacacacccgttcccatctcacttgcccacccagtgtgacaaccctcggtgtggatatacccccgtggactcatggctcttccccacccccactttctataaatgtaggcctagaatacgcttctctgttgcaaaactcagctaagttcctgcttccaccttgatgttgaaatatcttatgtaagagggcaggggatgtcgtgaagatggcaagaagaacacagtttcaaatttctggaaaagagcctgtggtggagatctaaagatgtttagggaagagctcgactaaagaacaatgaaataaatggtccaaggggaagtc

SEQ ID NO: 193 - DNA, 110608 bp, Homo sapiens
gatcatcagagtgacagaatgagaagccaccatctggccaccatcacgatcatcatcacaatcacgacgagtcaccaagagactaaaactactgagtaaaagcttagaaacggctgggcgcgctggctcacacctgccatcccagcactttgggaggctgaggtgggcggatcacaaggtcaggacatcgagatcgtcctggccaacacagtcaaaccccatttctaccacaaaaaattagccaggcatgatggcgcgtgcctgtaatcccagctactcaggaggctgagccaggagaatcgcttgaacccaggaggcggaggctgcagtgagcggagatcgcgccattgcactcctgcctgggcggcagagtgaaactctgtcccagaaaaaaataaagcttagaaagaggctatgtagtctcgagataaatccagccctatgaggcacatgtcaatcacagagggaaagctatgcacgcacaaagcatgtgtgaatcagagagaaagctatgcacgcacgatgagtagaagacaaacacgtcctgcaaggagacggaggcgcagggaaggggcggcagccgtcctcccaagacatgaggacttctagttcagtctgagaccttggtgcagggctgggcgagtaaacaaatgcaaaagaataaggacctcgaggtcgggcgcggtggctcaagcctgtaatcccagcactttgggaggccgaggtgggcgcatcacgaggtcaggagattgagaccatcctggctaacacagtgaaaccccgtctctaccaaaaatacaaaaaacttagctggacgtggtggtgggtgccagtagtcccaactacacaggaggctgaggcacgaggatcacttgaacctgggagacggaggctttagtgagctgagattgcaccactacactccaacctggctgacagagcgagactgtctcaaaaaaaaacaaacaaacaggtctggtgtacccagaatggaggcaccacgagttgctgaagaaggaaactttattcagtctatgataccaggacagttgtccatgctgccaggcaaaaagaaaaactggattctgatctcattatcagtacacaaacagcgacaattagtaacactgacacagccctgactgtgctgctggagggtccgaagcactctctgcacagcggtgaatccccacaatagccctctagggaaggtgctgttatcacccacgcgagacacacgaaggaaaggcacggctttgcagcagcagggtcacgattcgaacccaggtggcctgctcttatgataaacttaaatgtgtaaaactttatgctcaggaaaatataagagaatgtcttcctgaccctttttggggtaggacaataatttctctaaccaaaccccaaaagcatgacccattaaaaaaagggtcaggtggactaacttggctaaatgaagaattctgtttcaccaaagtacaccacaaagtgggccgggcgcagtggctcatgcctgtaatcctagcactttgggaggccaaggtgggcggatcacttgaggtcgggagctcgagaccagcctgaccaacatggtgaaaccctgtttctactaaaaatacaaaaattaaccaggtgtggtggtatgcacctgtaatcccagctactcgggagggtgaggcaggagaattgcttgaacccaggacggggaggttgcagtgagcccagactgcgccgctgcactccagcctgggcaacagggtgagaccctgtctcaaaaaaaaaaaaaaaaggccagacttggctcacgcctgtaatcccagcactttgggaggctgaggtgggtggatcacctgaggttgggagttccagatcagtctgaccaacatggagaaaccccatctctactaaaaatacaaagttggccggcatggtggcacatgcctttaaccccagctgctcaggaggctgaggcaggagaatcacttgaacacgggaggcagaggttgtgatgagccaagatcgcgccattgcacaacagcctgggcaataagaacaaaactctgtctcaaaaaaaaaaaaaagaaacaaaaaaaaatatatatatatatatacataccataaagtgaaatcaacagccacaacctgggaaaaaatacttgcaacatggcaaaggattaatatccagaaagtataaagaattcctacaaaccaagtagaaaaacaggcaaaaaaaaaaaaatgttggcggggcatggtggctcatgcttgtaatcccagcactttgggaggccaaggcgggcagatcacctgaggtcaggagttcgagaccagcctggccaacatgatgaaactccgtctctaccaaaaatacaaaaattagccaggcgtggtggcaggcgcctgtaatcccagccacgcaggaggctgaggcagcagaatcacttgaacctgggaggcggaggttgcagtgagctgagactgcgcctgctccagcctgggtgacacagcaagactccgtctcaaaaagtaaagaaaaaaaaaaaacaaaacaacatatttcacagagaagaatttatgtttttggagaaggagtttcgctcctgtcgcccaggctggagtgcagtggtgagatatcagctcactgcaacctcaacctcccaggttcaagcgattcacagaggacaatttctaaaaggcaaataagaagcaggaagggtgcatgctccttctctactgccctgtaacagtcattccacacttaccacctcaaaacaacaaatgcttttgatgttggctcctgtggggcagcaatctgcgggaagcttagccaggcacctctggcttaaggtccctcctgaagctgcagtcacaccatggaccagggctgtgacctcatccgaaggctcaactggggctgaggcccacctctgagctcactcaggtggacgctggctgggttcagttccttgctggctataggtggaaagggcccccaccagtttcttgccagcttctccacaggacgccccacagcctgacaggagctttcatccagcaagctcatcagggagtgggagagagcagccaggacaggagcccagacctttctgaacctcatctcagaagtgacatccttcccttctgctgtctgggcacagctccccgggtggagcccgaggactagaaggaaaagaaaacttggatttaaaatgggataaagccataggagctgctcgtcccaccacaggaatctcaacgccgggttactgacaaagcgtcactttgcacctcgtccaactgtgcagacctctcctagccaggcccctgcaccagaggttaagaatccgtgcccctggtcaggaagtccaggtgggttcaaacggccagcagggaatttcaggcaaaatgtgtcccaaatcttcaaaccatgccccagaactcagacctccccctgggagttcgtcccaaggaaaccacctgcaagaggctcaggctgcaggggacactccgcttccaaaacccggaagctggagaccacacaagtgcccaacgccaaaggcaccccgtggagggacgccctgtgccctcccccgaccaggtgacccgctgcgccctacacatcttcaccaggaaacatctgttatcgatgtggacgaagcgcagcctgcactcccagatccgctcattttcgttctgccctccgttttacgattcgcctacactgaaaatgcgtgagtggagtggaaagccttcctactcctgcctcagcgaccccttctaaaatactgcctcgtttggcctgaaaatgtgatttgcaggcttcctgagcaaagtagatttcactccattaaagaaaaaaaaaaagaaaaggcaccgaacggggctcggctgtcgggagttttgctttagttttttgcgtgttttgttttgtgtttttttgttgttgttgttctttttgcggccacgcacaccgcgttcccaggcttcagggcgtgggggtcgccgtggactcccggacgtgaaaacgcttaaagccagctgggaaaaccccaccagcgttttccgcgcacagcgccagccataggaaaggacccccaggagcgaatccgggcagggaaaccccggacgcccgcacactcagcatcagtaccggcacccagcacccagcaccgagcaccgagcacgcagcacccagcaccgatcaccgagcagagcaccccgcacgcagaacccaccgagagcctgatgcagtctccgccgcaggcatagcgctaggccccggcgccttcacaacaaagggacgctggcgggcggggcctgagaggcgcgcggtggaggggccgggcgcgaggccgcggagacagctcggagctcggcactggggagtggcacagcgctggcggatccaggtgggcttcacggggcgcccgcgggaccggaaatgacgcgcagaaccctgcatcgggctcctcgctgccccgcgggcgccgctcctcagtgccccagagccacggagccggggaaacgcgccgcggcccacaacgcccccgcggctgcccgttggttccgcccgggccgttctactccaggcagacgggaggagaaacacggcgcgctcagcgtcccctcccccgttggttctgctcgggcccttccactgcaggccgacgggggtggaaacacgcagttttttttttttttttaaggtctagggtaacacggggcttttaagtgcctctccgctgccgcctggtggtccagcccgggccgttgcagtgcagccacacggggagggacacggcgcgccgagtgctccgggcggccgcacgttggttccgcccgggccgttccactgcaggcagagggagaggacgacggtgcgcgtagtgcatccccgtggcccgttggttccgccggggccgttccactgaaggcagaaggggggggaccgtggccccaccccccgcggcagcccgttggttccgcccgggcggttccgcccgggctgttccaccagcggcacttcagggcgggatcggccagtctgtggaggcagcggcctctaagccccggagggtttactgcccaggtttgggttccaggaataagaaatccactgaataggcttaacttagaagacacaaaggcgcctcctggcggaagtggccacgctccgcccagcctgagggaaagctgctctgacagctgggcccggagctgcggggggcggggccgccgcgcggggtgaggactcgcctcagggcgctgattggctggtggcgcgctccggggcggggccttcgtatccaggctggcgtcggggctgccgcgggacatccggagcagacacccgcgggcgcgcctgcggccccgaggacccccggctccggagcttcgtcgagcgttttcctagcgttactttcccaaataattttcaggaatgaagttacggctaaagggctctttagagattacttttgggccgggcccggtggctcacgcctgtaatctcaacactttgggaggccgaggccggcgcatcacgaggtcaggagcttgagaccagcctggtatggccaacgtggtaaaacgtcgtctctactaaaaatacaaaaattggccgggcgtggtggcgggcgcctgtaatcccagctactccggaggctgaggaaggaggatcacctgaacccgggaggcggaggttgcagtgagccgagatggcgccactgcactccagcctggcgacagagcgagactccctgtcaaaagaaaaaagaaaagattacttttggccgggcgaggtggctcacgtctgtaatcccagcattttgagaggctgaggcgggcggatcgcctgaggtcaggagttcgagaccagcctggccaacatagtgaacccccccccatctctactaaaaatacaaaaaaaaattacccgggtctcgtggcgcgtgcctgtggtccccgctactcgggaggttgaggcaggagaatcgcttgaaccttggagttgaaggttgcagtgaggcgagatagcgccgctgctctccgacctgggcgacagtgggagacttcatctcataaataaataaataaataaatattacttttacgttttgttaaacttccacttgtttttgtttccgttgcatgaaccttcgtaaagcttcaggaggctgatggcagcctccttccccaggcttccccgtggcgcccgcagccgggttgggccagaggctgggactgtttcctcccgtggggtctttggtggggatgtccccagaggagtggggcaggaggaggggcacggagcgcccccgggagccggtcagagcgcagcgatggtgtctgtggttccaaccactcgggaggctgaggtgggaggatggcttgagcctgggagcttgaggctgcagtgagctagaatcacagcaccacactccagcctgggcgacagagtgagacccttgtctcacaaaaaaaaaaaaaaaaaaaaaaaaaaaaaaaaaaaggctgggtgcgttggctcgcgcctgtaatcccagcactttgggtggccgaggcgggcggatcacgaggtcaggagatcgagaccatcctggctaacacgatgaaaccccgtctctacaaaaaatacgaaaaaaaattagccgggcatggtggcacgtgcctgtaatcccagctacttgggaggctgaggcaggagaatcacttgaactcaggaggcagagcttgcagtgagccaagattgggccactgcactccagcctggcgacagagtgagactccgtcaaaaaaaaaaaaaaaaaaaaaaggaagaaagaaaattataaaatgaagtgaaattaacgcagtggagtgccacctgcctgctgcctgagttcactatccacacggagttcataaatttgagagcagtttacaaagtagattctcctactttccaggaaacccagaaatgtctggtgatttgcccaacagtctcagctgttgtggtcagcagggccgctgtggtatccaaatgatttcaaaagcagatttataaaaagtactccttttttttttgagatggaatttcgctctcatcgcccaggttggagtgcagtggcacgatctcagctcactgcaacctccgcctcccgggttcaagtgattctcctgcctcagcctcctgagtagctgggattacagatgtgtgccctcacgcccagctaatttttatatttttagtagagacagggtttcaccatgttggccaagatgttctccatctcctgaccttgtgatctgcccgcttcagcctcccaaagtgctgggattacaggcgtgagctaccccacgcccggcctttatttttttttgagacggagtctcactctgtcgcccaggctggagtgcagtggcgcgatctcggctcactgcaagctccacctcccaggttcaagagattcttctgcctcagcctcccgaggagttgggatcacaggcacccgccaccatgcccagctaattgttttgtatttttagtagagacggggtttcaccgttgttagccaggatgctcttgaactcctgacctcatgatccacccaccttggcctcccaaagtgctgggattacaggtgtgagccaccacgcctggcctctcaaagtttttatagcaaagccttacatttcatgaggaaccatgcattttattttatttttgagatgggggatctcgctactttgcccaggctgggctcaaactcagggctctctggcctcagcctcccgagtagctgggtctgcaggtggctgtcaccgtgctgggcctggggtgtgcgtattaatgattttggaatagtgtctggaagcctgtgtgctttcctctcttcctctccccagaaggacctcccacctcgtcctcccaaagtgttgggattacaggtgtgagccaccatgtcccctctctttgctattttgcctgggaggagtgtattaataattttaattttaaagttctttgattatgttctagtttgattattgatcatttacttcttagctatttatattcttccttgagtcatcggtttctgccctttgacaatttttctgtgaatgttttgtgtcgattatatgagctttgtctgtattgagaacatccacgaattgtattattgcatctgttttgctagttgagaacatcgacctgctgtattattgcaaatgttttcctgcttgcatgtagtcatttgttgtgcatattaatgaatttctatccacatgacgccggaaggggatagagtgggtggggaggaagagggaagggtccccacctggagacccagcctgcaggccactcggccacctgcgcagaggtaggggagcagcagccgctcatgcccctgcaatttgtcctcatcagcaggtggggaaactgaggccggggagttctccaggccaaggtcactcacgggcaagttcccgcagcctttggaccctccatacatgtcagggccgctcatgctttcctgggcccttcactggtttggaggaaccatcctgtttcccagagcgcactgcctgtctctgagtgtatgtgtctcagtggcgtccatgtgtatttttctgtgtgtgtatctgtgtgagtctgtgtgtgtggtgtgtttgtgtctgagtgtgtggtgttagcgtgtgtctcagtggcgtccatgcatatttttctgtgtgatgtgtctgtgtgtgtgtctctgagtgtgtggtgcctgcgtgtgtctcagtggtgtccatgcatatttttctgtgtggtgtgtctgtttgtgtgtgtgtgaatctacgtgggtgtttgtccatctttttgtctggcctcctgtcccctctgcacagagcagctgggtggggatgctggtcctgggggcttgtcagcaggatgtgggcgtggggcagccctgggtgaggcctgagtacaggccccaggtgcctcctgcacaggggtggctgagccggctcctctgtggctcccgggtccccaccgccggtcactgggcaccacctgtcctggccacccactcctgcccaccctgctctccgcaggggcctccttcctctttcagctgtgcgccctggttgtggaggctcctaaggaggttgtggcctcggtttaccacctgccttggctccttggtgttgccagaccctgaaggcagcccatgccctggctgagatccttctggggcaggatgtgctggaagcagctgaaacatgtggtgatgtaccagctcctgctgtcccctacatccccagcaccgccagccttccctgggctcctccagctggcttctctaccctgtacctgccccaccctgctttcccccgaccctactaccccccaaccagacttccagctccaggcagggtcgcagcctcctgggctcccagcaggacaggcctcacccagaccccgcaggagccgtgggacttgggctgggtctttgggcctggctgcagcccctttggacctgacctgaggagacaccctggctgtgggaggcagggtgggggtgccgggcccagcacagaggtgcccagggtgcaggctggcactggcccggcagggaccgtggatgccgccgtttcaggctcgaaaaggtttccatgccccagagcctgagcccggcagcccccgaggatgtcttggggcctctgtgctccccaaagccaagaaggttaggcttgacccacagcctcttccaggccggggaggcagaggcgctccaggtcggtagggcggggcccacagcccagggtttcacgtccccaaaacggggcagggtgctggaggggcaggtgtccacagggtggtcgttttggtctctcctggacttgcacgcgtgtagtgcagactggctgccggcaaagccctgagccacattcatctgggccttgttaggacaacagggacggtgcggggtgggggggttgcggggcgcaggaccacgtcagtggagggagggaggccgatatcggtgcccaggctgggcccaggggccagcgggtcctcacctggcttgtggctgcccctgttaggcagcccggatggaggggctcttccagccctgctggccccgggaatgcagggactcaactccccctggtctcagtggctcttccgggagcaacacagcctgcccgagtcgacaccacccctcgggtttgagtcccttctgtctacccctacccccgccagggcactgcccccttgcccggaagaggcagcggcacccccagccccttggggaggatgccctgccggccccacactcggtggatgggcattttggggctaggatttaatgggggtgaccctgcccgacccctctatgttggttccacggcgtcagaagaaagctgttattaacccagcttattttctacaagtcttgtttattgaaaggatctgaaaagcgtaataaggctttcaatgacatttaatacattttcaagaaattaatatgaaacattaaaatttacttcaaaaatccaaagttttctagatcattcccatctcacgctgctttagaggtcagttcacaccttctgtgttcagatgagcggctggaattctgaacactgccgtcttccagccctaacgctgggcgctggtccctctctcctaagcccacggctgggcttcccctgtgcccagggtcatggcggacttcaagccaggccggctgcccagaatcacactcagggtttttggacgctcaagtccacagatgctgaggtgcccagacgagggtgagcagggagacacatgcctcggagaacgtgcccaggctgggccaggcggctgcgggaagctcctcacgggcagaggagaacgtcttgtgccttccttatcgatctccagcagatgagggcaactttgtgtgcaaaactcagagagcagttactcaaaaaaaagacacccgggcagcagtaaccaggacaccagggtccgaccacggcctccacacacctgtgcccgtggaagacgcgggcgccggggtaggcagcatccacgtgctccacagctgctggtgctgggcaggctggagactcacgggagaggcaggaggagaatcagcgtgttgagtccctcgctgtgttagtgtgaaaaattctcattacagttgcaaataaaagggatcacgatcactagccccggaaaccctcatctcccggaccatcaggatcgcactgaacagaatggtcccctaatggtccctgaggacagcgtcttgcagaacataaatgtaaacattgaatggcagacgactcccttccccttgaaatcttcacaaaagtgtgtacgagaaagtatgtacatcagcacttcagaaaaggggcccacaggacgtgtgcggggtgtgcagggtgtgcggggtgtgcggggtgtttgagggtccggatgtgcgtcccgaggtcggagggttggacgcccctgtgtccagttgttgggaggggtgggaggcctcgccctgctgttcagccccttcccctccactgggccgcgttcccagggacgtgcaacagggcgctcaggttaggagacccgaaaccacaggcagacaggacccgccacgcccgctcccagccctgggcacccccacccccgtttccttccagtccattttccgcggcagtttttggtcctggggaccgtcaccgatgcctcccacgcacgctttcttccctgaagggagacgtcgctgcgctgggcctctcggcggtcccccccacccgggtcccgggcccactggccccccgcagacgccgctacacgctgactccagccaggctgcgctgggaccacttcaacctcacctacaggtgcgccctggctgggccccgggggagggggcgcggccggcgcccgctgagctcactctccctgcaggatcctctccttcccgcggaacctgctgagcccgcgggagacgcggcgggccctagctgccgccttccgcatgtggagcgacgtgtcccccttcagcttccgcgaggtggcccccgagcagcccagcgacctccggataggtgggcgcccgcccccgccccggcccggccctgcgcgcccggcctctcagccccgtgctccccccaggcttctacccgatcaaccacacggactgcctggtctccgcgctgcaccactgcttcgacggccccacgggggagctggcccacgccttcttccccccgcacggcggcatccacttcgacgacagcgagtactgggtcctgggccccacgcgctacagctggaagaaaggtgaccgtccaggctggcctcctggaggcctctcctctgcagcacagtgggctgccgcggtcgggctttggggcagacggcaggagggaccttccggggtggtggctgccactggagtctagcaggcaaggaggggagcccgtgggagcccccatcccggcagccctgaactccctttcccatccccctgcgcctctggagcgggagctggagctgcattcctgggggccgagctcaccgcctgggcccagaacattcttatctttccgtggctgcggccgagggcggctccgcggctgcgctccagcagatacaccgggcctcggggagctggcccacgggcggcggggctgggcccggggctcccaggcgctgacccccggggcccgcaggcgtgtggctcacggacctggtgcacgtggcggcccacgagatcggccacgcgctgggcctgatgcactcacaacacggccgggcgctcatgcacctgaacgccacgctgcgcggctggaaggcgttgtcccaggacgagctgtgggggctgcaccggctctacggtgagtccctttgtcgggcgggagggcggggaccgggcggtcctgagccaggccgtgctccccacgctcccgacaggatgcctcgacaggctgttcgtgtgcgcgtcctgggcgcggaggggcttctgcgacgctcgccggcggctcatgaagaggctctgccccagcagctgcgacttctgctacggtgatgcccacggggccgggacagggctgcgtgggagctgggccttggccatggtcggggctgagggggcactgacggggctctttcccccacccggagcagaattccccttccccacggtggccaccaccccaccgccccccaggaccaaaaccaggctggtgcccgagggcaggaacgtgaccttccgctgcggccagaagatcctccacaagaaagggaaagtgtagtgagtgagcgccccgggcggtcctcggggtgggcagcccgcgggcggccttggggcaggggtgcggggcaggcagcgggggggggctgtgcctgcaggagacgccccgcccccctgcagctggtacaaggaccaggagcccctggagttctcctaccccggctacctggccctgggcgaggcgcacctgagcatcatcgccaacgccgtcaatgagggcacctacacctgcgtggtgcgccgccagcagcgcgtgctgaccacctactcctggcgagtccgtgtgcggggctgagcccggctgataaagcactttctctctgatggctcctcgctcattcttgggagggcagcgggcagccagtctgggcaggtggacaccccagcccctggtccaccgagagctgggcgtcctcggggctgggcacccctgcttccccgcacagcggaccacaggtacagcacaggacgggacgggctttgctaaggtggcccctgggaaagtgggataagaggaggccccagtgacaggggcagcacgtggagcagcacctggggtagccccagaagcctgggttctgtctaggacttgctcagagctgggggagggaggcaaagggggcttcctgaaagatgtggctgggatgggcctccaggatcttctgcaaggagatgtgggtgggggctgggaggactggcacagggtgggggaccaccttgccagagtggaggccccccaggaggtaggagctcccctcctgcctggggaagacactggcccacatggggtcagaggccacagccgcccaccccaccctcttcccctagagcccggtggtctgcgactcccctcccacacatggtcccgggtcactcaaaggacgacacggggagctttcctcgaagaatattttaatacattttaaaactcaacaaccttgtataaaaacctgtcgagtctgctggcacagctggggctgggggttgggggccgggggcctgtgtggacagggctggtctggacgagtgggttggggcaagagggcatcgctcatcccaacacagaaacaggtctccagctccgaagattaaacaatccacccggctcccaccagttcctttccaaatcacggcccagccagccccgtgcgtgtcgagagtgggagagggtgtgtggaggtttgtgctgccccacgtgggcacccgaagatgccctggcaagtcacggagaaaacacagctctttcctccacaacaaggaaaatgatttaattctacaaatttacaaaccaaaatacaaaaacaaaacatggagcacaaagtaagacgaggagttccgagtctcatcgcagctccagccgcagtagccacgcctgtggtcccggctgagttctccccatgacggggtccactctgaccttcagaacttgaggctgaagccggggcccgcggcagaggccccctggttcgtggtggtaaggtggaagcccgtctccttcaggtcgtcgtcaccctgggacgagtcggctaccgtgagaaccctgcccaagccagccccacctgtgggcacgccccacccgccaggcccctcaccagctggctgtagcccaggcctccctcagggggcctcgggctggtgccccgcttcacacgctgctgctcgctcttggcgggccacgtggggaacatggaggggtcgatggggaggggggtctcgcggaaatactcatgcttgaggccgtcctcagcgctgatcctcctcccggggaagtaggtcaggaacctggggggagagggccagaggcccaggaggtgctcgtgtgctccactgggtcccccaaagatgggctgtgttgggacggggctcagggcatgggacgccaggcaccagagcagttctggaacgtggtgagccagcaggtaggcctgggactgggaagtcaccgctatggctcgggacctcccgccacccggctgcactgggctcacttgttcatgaggtcgaagccctggtctgagagcagagccccgaagcgcttgcggaggttgttgtaggggtgctcgctgaaggtcatctttttgactactgggagctcactgtagccgggccagattttctcactgggggtccccagctcctgaaagacagaggtgcttcaacagccacaccaagtggcccacagtgttggcacctgtgtcccgtcagagaagacaagccaccaggagggctctcagtggccctggtccccatctcaacccagcacctgtgcgccccgcagccccattcctgcaactcctctgaaatccatagcgcacctgcggcagggccagacccaccttgaacactttgttgatctgatcgatttccgaattcccggggaacagaggcttctgagtcagcagctccccgaagatgcagcccactgaccacatgtccacggccgtggagtattcctaagacgccaggagaggtgttcaggaaggccagtgcccgcgaagctgtgggaggctgcatgggggacaggggaggcactcagacgcccaggactcaccttggcaccaagcagcagctctggggcgcggtaccactgggtcaccacgaccggggtgtaggccttcagaggggatccgtactcccgcgccagcccaaaatcacccacctgcaacgacagatgggcggctgtgggtgggcctgggcgggtcaccctgggatgggccactcggaggggggctcaccttgaggatgccggcgtggctcagcagcaggttggacgtcttgaggtcacggtgcaggatccagttgtcgtgcaggtgtttcaccccccgcagcagctggatcatcagggtcttcacctcccctgggagggagggaggctcccatgtggacccggccgccccaagcccagggcactcagggtggcccgctcgcctcggcagcaacagaggcttctcagggctttccctgtggatgcagctggccctccctgcagcactgtcaccgcgggggtgaccaggacactgcccccacttgtacgcagacaggaccccggggcgcggctgtacctggcaggaagggctgtttcatggtctccatcaggctcttgaggtcgtgctccacgtagttcatcacgatgtagatcttgtccatgttgctgcccaccacaatctcctgcagggcacggctctgtgggtgctgggcacctccaggcccccacccacccctgcacccgggcgcagatgctgagggacagtaaggacctccggtgccacccgggaggcaaatacttgcttctgtgtggtctgtgaagggctccactaagtgcaggagagtgtaggaagcacccggccccaggacagcacggggccctgtcggaaaagccttccacccggggccaggcgtggtggggccatgctcactctaacggtgacaatgttgggatgctgggccttgaggatggtgttgatctccctcagggacgtgatcgggaagccctccttctccttctccatcttcagccgctttagagccacaatttcatctgtgaagaaaatacagacggcactgagaggcattctcaaagtcacggtaccaacagtggactcgttcagtgaggaccgcaggcagtgcccaaagcgccagcatttcacggaggggggtctcgttctaggtgggggcacgtgggcaccaggagaacgccccagctgaggtctcggcaacacccacggcttcccactcaacacaccacagacactcacagccacctacagccacctgggatcccagcggccacgccgactccacatcgacttccccaacagagccggcctcacctgggatcccagtggccgactcccaacagagttcccggctcacacacctgcttgggtgggacgctgggaacgcaaacctgcacaccagccccggcacagaccactccacgcgctgggcctcggccctgtggggcaggccgcctgctactgcaagggagtggcaaagccccagggccaggctgacctctggcttctagaggtgctgaggggtccaacctccagtagctgctcaggtgaagcgggcccaggtgcagtcgcagctctcgggcagccagcccctgccccacttcccctgcctttgtggggtgaggggaccccacccacctgttttcttgtcttttgctctgtagaccactccataggtgccctcctcgatcctgttcaggcactggaactcctcgacgctccggcagccctgggaaggaagcgcctgtgtgaggtctcagtggccatgccagctggagggagggcggctgcgtccacaggcacggcacacccagcacggggcaggtgcagggcagagccttgggactgggccgggggtggagctgggagcagctcagttctttcaaagtctctttccttgcaaaaccatctgacactttattatgaaacaaaaccagtgtgaacaaaaggccatcccagccaggtgcaagggctcaggcctgtaattccagcactttgggagggcaaggcaggaggattgcttgagcccaggagttcaagaccagcctggccaacatagcaacactctgttttctttttttctttttgagatggagtctcgctctgtcacccaggctggagtgcaatggtgagatctcggctcactgcaacctccacctcctgggttcaggcgattctcctgcctcagcctccctagtagctgggagtataggtacgcaccaccacgccaggctaatttttgtatttttagtagagacaggatttcaccatattggccaggctggtctcgaactcctgacctctgatccgcccaccgcctcggcctcccaaagtgctgggattacaggcgtgagccactgtgcctggccaaaactcttctctacaaaataaaaaaattagccaggcatggtggcttgcgcctgtagttccagctactcaggaggctgagatgggaggattgtttgagcctgggaggtggaggctccagtgagctatgattaagccactccactccagcctggatgacagagacagacccagtctccaaaaaaaaggccatccggagagtctctctgtcaaagtggatgtgtcccctgcttgtaccaggatgacactgaggacgggccctacctgccaggcgcagcatgatgccccatgccagggcacctacccctcggtgtaccttggggccggtgcccaggccggatgtcacgtactctgggtggcctgtggcccgacgcctacgctcagcagcactaaggggcagaggcgctcacaaggcatagggcagtcgacagaggcctgctgcatgcgccagagagaacctctccgcccacaggcaccaaggagggggccgagtccctgccggtctcccaggcccccgaggccactggtaccttctcaggcttgtcccttccaaatcactcccaacaatatcctgccttattgatagctgcctgagcaaaaggcttctggtcacacatctacactgactcccgtagccgctcccccatccaagccctgcacagatgccggtaacaaggccttggtgcctacataacccgcccacgcaggggtcaagtggaaggcactgctctccagtgcggaggaggacgcaactcgggcagcagtgacagcagcgcggccgcacgcccaggctgcctttcaagccgcagagcagtcctgcgggcagctccctgtccacccagttccgtccagcatgagaaagaggcgggacctagaagcatgaggggccagtggctgtgcccgcccgtcactgccccagtgggcccagcagccctgtgaggcgacagacgccaacacgggggccaggcttcgctcagcccctgtggtaactccgactgccaatgcggacagcggcccggggcgaggggagggcctgacctgcagggccggcaggtacttgggcagctcctgcttgagctcgatgggcaacagggcaggggagtcgggcacatagtcgccctctgtcagggcgctgctctgcggcgttccctcacccacttcttcctctgcttcttcactctccccggaatctcggtcgaaccgtgactctggaactggaaaagttgaacctaattacgaagctaggagtaagtaaggatcatgaacctcctcctgccccgggggcatcaagcgcgtggcagggctgccccgtgtcccgctgggaggtgctggcgctgggctctcgtcccctggacacagggcaccgaggcctaagagtgctggcaggctcggctgagacagagcccggatgctgagctgggaggaggcgtcgggtgtcatgtgggggacaagcccacatccacgtccaccaggctgaggacataacctcactgcctgtcggaggctgggccaggcctctgttctgcagggacaggcccggagccaccatctgacgggcctcccctgtggggaactggtcctgggcttcccagctcctcggccctgctgggcactcaggacgcccttggtcagcactgtgcctcgctgaggaatgcgggccccaccggcacagcctggagcggccaacgaatcaggcggcctcccagaccctggcgtgccccacgccgcgcaggaccggctgtcttaggagagggctgctgcactcggagacagacaaggagggggctctgtctccagggaggttcttaccaaccaagaggtggttttcattttctcgttcttcatcttcactcatttcttcctcacttacttcttctgcaagagaaaggaggcgtctgctcagaccagcaccggggcgagtgctgccacaggcaggatgcgggctccgcttcagctaagcaacaagtgttcccaagaatggatatggaggctgggcgcggtggctcacgcctgtaatcccagtgctttgggaggccgaggcgggtggatcacctgaggtcaggagttcgagaccatcctggccaacgtggtgaaaccccgtctcgactaaaaatacaaaaattatccgggcgtggtggcgcacacctgtactcccagctacttgggaggctgaggcgggaggatcacttgaacccgggaggcagaggttgcagtgagccgagatcatgccactgcactccagcctgggcaacagatcaagattccatctcaaaaaaacaaacaaaaagaatcgatgtggaggtgtcccgagagagtcctagatagaagggagtttcaactcccccgcccgccagctacttctctgcggtttctaacactatagtgaagtcacaacacctcacacagtcgtcgcggtgcctcaccggcagactgctctgatgcctcctcagagttgctgccggtctcctcctcctcctcttcctcttcctcctcctcctcctctgattcttcactggtgctcccttcctcctcctcctcttcctcctcctcctcttcttcctcagaacctgagcctgattccgctgtagaaagacagcagagcagagggtgaacctgggccttcctgggcagcagtggtcaaggccttggccaggcggttccaggtacctgacgaggactcggccgagctggtcttcctctcgctgtcgctgatgtcctgtaagtcggacagcaggtccctttcttccattttctcttcttttacttatgagataaaccataaaggtgaatttggggaaatgtttttaaacaaacaagctaccaccaccccaaaactagtgcctttcacgtaacgattaactttgcttggtcggaaaccagctcatccacagacgctggaagccacttctctaacggggccagtggcgaatgtcccagcggataaacacacgtcctgtgtcctggccgcacacagacactcacggtccctctcacgacacgagaggacttcagccagcacatctctcactttcttctgaagcggttacttagctgggctttaaatgaatcctacacacttatgccaaacatcccccagaaaagactcacactgtgctggcttctgcgcaggcgccggcctggcctcacctggcttccggccgtctcccaactcgaaccgctcccgcggcggccgaggcgggctgcgactccagtggctggctttcactttgtcgctgtagtcctctctcatcgttcggtgatgtgcagacactggcgcgcagggcagagagggagatggcactagcagcactgccttcctcaaaaggccccacccggcacagctgcctcgtctcccacacccgcacctggcagacacacccacagcgtgcacagggtgctgacagcatcggggtcagaggccagaggtctcccaggaagcccagggagaaaaagctccaacctggaggccgtgagcccgaggacccaggtggaccttctagactgatcttcactggtcaaaaaggaaggggcgggagaagattctggaaagatggagtaggaagcactgggaatcagtctccccaccgagacaacacttgcatcacaggatcaggcctgtgcaactactgaggtgctctggagtctactgaaggtttgcaacttcagggggaatcttggagagtaaactgtgattcattaatcaacgtcaccgcttcgcacattagtggctcccacctcactccccgctggcaggcagcagcctgcatgcagctcgccggacccaggtgggcagacggacacacacacccgaggtcagtgtgatgactgcgtgtcccaccccagaggcatgaagaggcagcagccacggccacccccaagctgaaggtacttccagggcatgagcaccacgtcccccgttgcccccttcatttctctctattccccctttaggaggcagacacttcaggacaagaacattaaaaacatctgtattgacgggaacgttaaaaagtggctgcacgtgaccaggaaaaggctcaggctcagaaaagacccgtgaagaccctgagtttccacaacaggccgaccccacagacacagcccagcacaaccaaaacaacaagtgcacacccttgagtggggaccaggaagaatcacatcatgagaatcaaatgtccatttttttgactaagaaaaacacaagagaaacaaagaaacaggacagtatgtcccattcagaggggaaaaaaagaagccaacagacacggttcctgaaaatcacctgacggtagatgtcccagacaaagattttagggaactgtcttaaaccttcagttcctcagagaacgaaaggaagatgtggagaaagtcaagaaaatgacgcgtgaacacgacggaaatatcaacagagacagaagatccaacaagaaaccagagagaaattccagagctaataagtacatgctcacaatagacactaaaaagtaaatattcacaacagaaactcacaggcagatgtgagcaggcagaagaaataatcggtgagcctgaagacaataaaatcacatcgtctgaggaaaagaaagcagaagagactgaagaaaagggagcagtgctgagcggcctcggggaccccaacagatctgtgggagcccaggagggaggagaggagcagagagggtatctgaagaattcctcaaaacccccacattggatgaaaaccgtaaatataaacattagagaggctcagtgaactccaggtagaatgaagtcaagaggcccacaggaaaacccattattaaacagttgaaagcctaaggcaaagagaatcttcaaagcatccaagggatcctcaattaggtcatcagattaaagcatccaagggatcctctataagatcatcagatttctcatcagaaactttggaggccagaagacaatgggctgaaatagtccaagtgaaaaggaaaaactgtcagctaggcatgagggttccttgagcccaggaattcaagaccagcctgggcaatacagggacaccttgtttctactgaaaaatgagccaggtgtggtggcacacgctacgcctgtaggtcccagctacgcgggaggctgaggtgggaagatcacttgtgcccaggagttcgaggttgcagtgagctatgatcgctccactgcactccagcctgggcaacagaagaagactctgtctcaaaacaacaacaacaaaattgtcaaccaagaaccacgtatccagcaaactttccttcaaagatgagggagaaatgaggatattctcagataaacaaaagcagagggagttcattactactagacctagacctgccttgaagaataagctccagggagttgtgtggggtgtaaggaaaggacgcgagacagaaaccggaagctgggtgaagaaataaagatctccattaaggtgaggacgtgggtgactataaaagctcgtactggccggccgcggtggctcacgcctgtaatcgcagcactgtgggaggccgaggtgggtggatcacgaggccaagagatcaagagactattctggctaacacggtgaaaccctgtctctactaaaaatataaaaaaatagctgaacatggtggcgggtgcctgtaatccctgctactccggaggctgaggcaggaggatcacttgaacccggggggcagagggtgcagtgagccgagatcgcgccaccgcactccagcctgggggacaagagcaaaactctgcctccaaaaaaaaaaaaaaaggcaggggcgaaaagcaagcaccggaaccaagcgcccgcctgtgacagcaagtgcccagcaccagggggcagcagacacgcgtcccgccgagcacagctgcccaccgcgccgcctaccttccctgcgggcctcccgctccttgcgccgctcctccgcccgccgctcgcgctccttctgctcccgctgctccttctgctgctcccgcatcttgcgctcccgctcccgcttcctttctaactgctccaagcggtccctgaagaggcacacgccatcattccccctaaacagaagcttgcttatcgcgtttttgtccacatttgtaagctggctttctacgtaattcaatccgtgaagtttttttttcatttttttattttattttctttgagacggagtcttcatctgtcccccaggctggagtgcggtggcgcgatctcggctcactgcaacctccgcctcccgggttcgagcgattctcctgcctcagcctcccgagtagctgggattacaggcgtgcgccctgtactcccagctaatttttgtatttttagtagagacgagggtttcaccatgttagccaggatggtctcaatctcctgacctcgtgatccgcctgcctccgcttttcaaagtgctgggtttacaggcccgagccaccgtgcccagctgccatttccaattctaattaataaatgatccatttctttccattcgatcggtgtttgcttcatggattttgggctctgtggttagatgcattcacatgtatcattgctgtatcttcctgctgtattggcctgtttctggctgtgaagtccttgctccttcttgtttctagctttttttttttttttgagacagggtcttggtttgtcacccaggctggagtgcagtggcgcaatctcggctcactgcaacctccatctcacgagttcaagtgattctcatacctgagcctcccgagtagctgggattacaggtgtgcaccaccacacccaggtgatttttgtatttttactagagacagggtttcaccatgttggccaggctggtttctaatatttcttaacatctgttttgtctggtatgagtacagccattcaagctctcctatgacagctgatgtttgtacgctgcgtcttttcctgttctctagcagacagcatacagttagatcttgtttttctatctgataatctgccctgtctgtttggggcacagagacctttcacatgtcatataattacacgtacagttggatttactttccttgctttgttgtgtcttttttattcttccctttttgattttaaattacatacgtttagcataccattttaatttatttgtactttttagaacactaagaaaacaactttcttagtggttgctctagggatcaccatatgcctcatgatactagctcaagtccagtacaatataaaactgttgtaacacagcttcattccctgtcttctttgtgcagtccatttatgccacataccacgacaacagtgtaattattttacacaatcgtagttccagtaaaacctaagatgtgaggagagatatttacaggatattgacgtcaacctacacttgctatctgcagtgcctgtccttccttcctgaggattcaagttaccgtctggtgtcatttctattcaacttgaaggtcttcctttagtatttcctttaaggcaggtttcgccaacaatgaatcccaccagtctctgcttctcagggaatgtcgttcgttccctttcacttgtgtagaacagttttgattcctggctgatggttcttctctctaagcagcttgagtatgccactccactgccttctggcctccattgtttctaagaagtcagtggctggcggtattgaagctcccctttcatgggatgggtcattcttctctgagccctttcaacattttctctttggcctttgccagtttgactatgatgtgactttgcatttattctagttcaaacttcctgtgctcttgaatgtgcatattttttaattaaaatttggaaagtttttaaccattattgtaacaaatatctttcctctctcctggaacccccattcgacgtgctttggtacagcagatgttgtaccacgggtttctgaggctctgtgcatttttcttgtttttttctctctgttcttcagaatggataatttctactgctccatccacaagttgtttccaagcctttactaaattcaacatctggacactcaagacagtttctactgatgatgttcttcctcagtacgggtcacactgtcatacttctttgtattttagataatacatttgtagcaattctggattctaagttttccctttcgttgttaccaccaaggcctgtctggttgtccgtgaaatccatctccctcatagctcatggccaccccgttccttcccacatgcctattttaattttcaaccttggcttcctaggggtcaccaccatggctgcacagcttagcaattagccagcactggaaaaaggctgggctcaaatacctcgagcacagtaaggcttccttggcccacggctgtgtgtggacagggagcacactgaacgttcaggcgtcattcgcatctgtggcggcttctattttctgctaggtcctttcacgcagctgcatcctcagggctggtcacaagtgggtggcggctcgagctctctccagtctctgctgcacgtctttggcgggatcacagctgctcccaaccacactgtacttcattctagcagacctcttggccttttcctccctccactgaggatgctggtgggcaaggccactgcccactgctctaaacggagtaaccccttccaaggcagcaaggaaactgcaggtcctgcagctgccctgtcccagtggaacctccgtgcttccaagtgcagagtggaagcagtaaagggagcagctctcaggccagaaggtcagattcttactgcttttacccacagctcagcagttttccaagcatcagtgcttctcagattatccttatcagtttcctttttgtcagagacaaggtctctctacgttgcccaggctggcgtcatgcggtcctctggccttagcctcccacgtagcatatgctaccacacccagttctggattggctgatctgaatcggccctacccagaagtctgcccccaacaatttttgttcattcactctcctgtctttaccttctgggaaatcaatatgacagcccaaatttcatctaccaacctccacttctatcccaagctctactctcgtgggacaagacacactcaatgtctggcacagggcgtggcatacatgaatgtttcacacactaacaggaactaggccaactgaaaccttgctcacccagcagcggtctcggaccttgacccctgggcctcagtgtctcccacacccttcggcatcaacaagaaccagcgccctctcatcatctttacatgctgtgtacccagccctggctgctggcaaacatcgctgcacacgcccttccgcttcagactcctctcttcctggagcagcttgcaagctttctgtggactcactctgaaggcggagatgggcctgctcgcacctggcctacagcctttttcctggttcacagaacagatctggggctacaccgatgttctttcttgggaatctggctcataaaggggaacgaatatacagactaatggccaggagtcctaggagtccagtgtcccgatttccagactgtttcaaggtttttgggatctcccttctcctttttttgagacagtctcactctgtcaaccaggctggagtgcagtagcatggtcatagcttactgcagccttgacctcccaggctcaagggatccaaccacctcagcctcgtaagtgctggaattctagcgtgagccactgcgcccggcgggacgtgcagatttctgatcccttcattgtcttccctcaatcaaatcacacccgttcttacttccagatgcagtgaaaactcactccctcaggacagttctcttggtcagcctcgtccagcgttcactgtgctgtttccatgtctaccacttctgcaacaaatgtgacttctattgccaaattcttcttcattgctgtgacaggacacactaccacggccctttcataaagtcctcaactgacccagcccactcacctttctctcctggaatgctcccttgccatttcccttctcttctgtctttcccattcccggcgagctttatcctgttcttctcgatgtcgtttccgacgttcgtgctctctttctttcactctagcatgcttccctaatgagaaataaagtgtcatgcaaagaaacctcacttcaaaaatttcacgaggccgggcacggtggcttacgcctgtaatcccagcactttgggaggccgaggcgggtggatcacctgaggtcaggagttcaaaaccagcctggccaacatggtgaaaccccgtctctactaaaaatacaaaaattagctgggcgtggtggcaggcacctgtaatcccaggtactaagggaggctgaggctgtagaatcacttgaacctgggaggtggaggttgcggtgagccgagatcgtgccactgcactccagcctgggcgaaaaagtgagactccatctcaaaaaaaaaaaaaaaaaaaaaaaaaaaaaaaaaaaaaatcacatgaaaatgaaattaaatcaagaacattaaatatttaaataatgatgttaagtaatcctaatctttttttttttttttttgaagagacagggtctcactatattggccaagctggtcttgaactcctgggctcaagtgatcctccatccttgtcctcccaaagtgctgggattacaggcctgggccactgcacccagtcgaataatcatgattttatgttaaataaaaaactttgaaaatagaaaactatctgcagtaagcgtctaattatgaagaaagaagaaaaaagaaaaacaattctgctatcacagaagagaattgtaatattcatcttttaaaaattttctatactgaataaactataattatcagttttataatacaaaaaccactcttcacaaagactacagaacaaagctttgctatcagtgggcttctccactgtgcaatgaagccacattaattaatcaagcgtatttataataatgagatttcaatcgggctccaggtccaattttcctaacacccgtaagaatctcctgatgttggtacgagatcaaactgctcaagcctaacccattctttggacttgagcaaatacccattttggggtgtgtttttctcctatacttgttgaattcaggtcattttaaatgtaaacaaactgctcccaaacaatataatgggggagagaaaaccccagaggaaaaatggactagccattctgaatggtctgtgacacacgcacgctttcagctagagtttgctctctctggttttcggtctgtgacacacgcatgctttcagctagagtttgctctctctggttttcggtctgtgacacacgcacactttcagctggagtatcctctctatagcccctctgaacggtctgtgacacacgcatgctttcagctagagtttgctctctctggttttcggtctgtgacacacgcacgctttcagctagagtatcctctctatagcccctctgaacggtctgtgacacacgcatgctttcagctagagtttgctctctctggttttcagtctgtgacacatgcatgctttcagctagagtattctctctatagcccttctgaatggtctgtgacacacgcatgctttcagctggagtttgctctgtctggttttcggtctgtgacacacgcatgcttttagctagtttgctctctatagcccttctgaatggtctgtgacacacgcacgctttcagctagagtttgctctttctggttttcggtctgtgacacacgcatgctttcagctagagtttgctctctctggttttcggtctgtgacacacgcatgctttcagctagggtattctctctatagcccttctgaatggtctgtgacacacgcatgctttcaggtggagtttgctctctctggttttcggtctgtgacacacgcatgctttcagctagagtattctctctatagcccctctgaacggtctgtgacacacgcatgctttcagctggagtttgctctctctggttttcggtctgtgacacacgcaggcttttagctagagtttgctctccatagcccttctgaatggtctgtgacacacgcacgctttcagctagagtttgctctctctggttttcggtctgtgatacacgcacgctttcagctagagtttgctctctctggttttcggtctgtgacacacgcacgctttcagctagagtattctctctatagccattctgaacggtctgtgacgcacgtatgctttcagctagagtattcttttttttttttttgagacggagtcttgctctgtcgcccaggctagagtgtgcagtggtgcgatagcggctcactgcaagctccgcctcccaggttcatgccattctcctgcctcagcctccagagcagctgggactacaggtgcccgccaccacgcccggctaattttttgtatttttagtagagactgggtttcaccgtgttagccaggatggtcttgatctcctgaccttgtgatccacccgcctcagcctcccaaagtgctgggattacaggcttgagccaccacgcccggccttcagctagagtattctctctatagcccttctgaatggtctgtgacacacgcatgctttcagctagagtttgctctctctatagcccttctgaatggcctgtgacacacgcatgctttcagctagtttgctctctctggttttcggtctgtgacgcacacatgctttcagctagagtttgctctctatagcccctctgaatggtctgtgacacatgcatgctttcagctattctctctatagcccttctgaacggtctgtgacaccattatgctttcagctacagtttgctttctctggtttttcagtggtgctctggggaaggcagaagagtaggaacaggaaagaaaccacacttgaacatgatgtcaaagaaagtaaatgcttctgtacccccttctgctgaatggctatgatgcctacatttttcttttctcttttcatcttttctgtgatgaactttttctttccgagacatttgctggggtggtttgatggccaaagaatcatcttcttctcctctgaaataaaacacaacagcactgcgtcatgcttgagaaagtgcggaaaagcatcaggctattatgaggttttttcaacccagaaaaatgcatgattcagataggaacgaagctgaaacatcatttaaaaaattacattaattctccaacttcaggcatctttttttttttttttttttagacggagtctcgctctgtcacccaggctggagtgtagacacgcgatctcggatcactgcaacctccacctttccgggttcacaccattctcctgcctcagcctccggagtagctgggactacaggcacccgccaccacacccagctaatttttgtatttttagtagagacggggtttcactgtgttagccaagatggtctcaatctcctaacctggtgatctgcctgcctcggcttcccaaagtgctgggattacaggcgtgagccaccgcgcccggcctaggagtcttaagattcagatgaaaaatgtaagaaatcaatgttttgtgcagatggaacgaaatgcctctcagaggacctgcagggggtgaggggcaggttcattagcttgactgtggtgacagtttcaggggcatgtaaaaatacatcacatcttatttatttaatttaattttatttatttatttattttatttgagattggagtcttgctctgtcgcccaggctggagggcagtggcgagactctcggctcactacaagctctacctcctgggttcatgccattctcctgcctcagccttccaagtaactgggactacaggcgcccaccaccacgcccggctaattttttttgtattttttagtagagacggagtttcactgtgttagccagggtggtctcgatctcctgaccttgtgatctgcccgcctcagcctcccaaagtgctgggattacaggtgtgagccgccacgcccggcctgtatttatttttttgagatggagtctcgctctgttgcccaggctggagtccagcggcgcaatcttggctcactgcaacctctgcctcctgtcccaggttcgagcaattctcctgcctcagcctccggagtagctgggagtacaggcgtgcgctaccacacccagctaatttttatatttttagtagagacggggtttcaccatattggtcaggctgatctgaaactcatgacctcatgatccacccgcctcagcctcccaaagtgctgggattacaggcatgagccatcgcacccggacttattatttttttcagacagaatcttgctatgtcccccagggtagaatacagaggcacaatcttggctcactgcaacctttgcctcccacattcaagcaattctcctgcctcagcctcctgagtagctgggactacaggtgtacaccaccatgccaggctaatttttgtatttgtagtagagacaggctttcaccagtaaccctaggaaagagtaaacctcaatagttgtaacagcatgccctgtcacagtaatcctaggtcgtggctcgcacctgtaatcccagcattttgggaggccgaggtggacggatcaccaggtcagaagatcgagaccatcctggctaattttttgtatttttagtagagacggggtttcaccgtgttagccaggaggctgaggcaggagaatggtgtgaaccagggaggcggagcttgcagtgagccgagatggcgccactgcactccagcctgggtgagcaagactcttgagacaccgtctcaaaaaaaaaaagagtacacttcagtatttacaacagcacactgagcacactgtcacagtaaccctaggaaagagtaaaccttaatagttacaatagcacaccccgtcacgtaaccctagggaagagtaaacctcaatagttaaaacagcacaccccgtcacagtagccctaggaaagagtaaacctcaatagttacaacagcacaccctgtcacggtaaccttaggaaagagtaatctcagtagtacaacagctacaacacgccctgtcacggtaactctaggaaagagtaaaccttaatagttacaatagcacacagttgtcacagtgaccctaggaaggactggccaggccagggctgtgtacagttgggtcttgcacatctgtacatccgctcacctgtcttccattgagtcttctcttctatacggggagttccttattgtgatctccatgcagtgatctctcagctccccctcctcaagggaatcccgcttggaatcccggtcatcagactaagaagcaaagagaaagttaatcattttctttataagtttttttttcttcatagataaaagtatttttaatgataatcaaacctgggcaacatcccaaaacaaactttcacatgtactctgaatgagccagtgttataaaatataaagaatttttggccaggtgcagtggctcacgcttgttaatcccagcactttgggaggccgaggcgggtggatcacgaggtcaggacattaagaccatcctggctaacacggagagaccccatctctactaaaaatacaaaaaattagcttggcatgttggtgagcccctgtagtcccagctactcaggaagctgaggtaggagaatggtgtgaacctggccctgggcgacagtgcgagattccgtctcaaaaacaaaaaaaaagctaacaaagtgagcacatgctattggaaaaatactcaaagcagagttgctacaaacctttaatttggaaaaatttcaatatctgtgaagcataataaagtgaagtgcaaggtatgcctgtactcactaacatcccaaatgatgctacaaatcttagcaaaagaggtactttgccaatgcctcttaccaaattactaaaaaggtttcctgagtacattaccatgcaaaccaagaaagacgtaaaatatttatattaatttcaaggcaagttcccactatattaaaaatacttagagatagtattatgaatatactaataatgaaccgagaaaaattagtccagttttgctaatgacttaacattcaacgtattttattctccatgtatgctcaatctagacacagctttagtgtgttaaatctgcctttaatgtcaactgaatattagaatacattttgggctcacctgcgacatttggaagtacaaaagaacttcaccgaagaagcgttgttctaatggaaaaatgagggcaaagaaattaaatctcctttaagaaaaccacttacttaaaaaaatatggcttacattttttaagcgttttatctctgctttctcctcttgttccttccttcgtttcttttcctgaagaatttcatctaaagttttcactttccaagagtccttttcatcacccatttgagttaaaacactgcaaaaagaaaaataattcagcctacatcaggacacagcaagctatggtgctgaacacttgaacctagtcacttttgagggattcagaataaatcctcattaagaataagaagttgtgcccggcgcagtggctcaagacggtaaccctagcactttgggaggccgaggcgagcagatcgctggagttccggagttcaacaccagcccgggcaacatggcaaaacctcgtctctacaaaaaatacaaaagttagcccagtgtggtggcgcgtgcctgtattcctagctacaggaaggaggctgctagaggcaggaggatcacttgaatcagagaggtcaaggctgcaatgagccaagactgcgccactgcactccagcctagataacaaagtaagacttggttaaaaaaaaaaaaaaaaaaaggtaagctctaggctgaggcgggtggatcacaaggtcgggaggtcaagaccagcctggccaacacggcgaaaaccctgtctccactaaaaatacaaaacttagctgggcgtggtggcgggtgcctgtaatcccagctactcgggaggccgaggcagcagaatcgcttgaatccgaaaggcggaggttccggtgagccgaggtcgcgtcactgcactccagcaagaccccgtctcaaaaaaaaaaaaaaaaaaaaaaaaaaaaaaaaaaacaagaatgataagttgtaagccaggcaaggtggcgagcgcctgtagtcccatatactctgcaagctgagatgggagaccgattgagcccaggagttccaggctgaagtgcgcttgtgaacagccactgcgctgcagcatgggcgacaaaaaagagtgatgggttctgaaaaatgaccgcttgaaatcaagtctcgtttctgtcattcttgtatggtcttgggtaacgtaattcacctcagttcagtcttccgtacaaccagaataacaacacctacgtgatagtatcgatcgcggattaaagatcatccgtttaaaggctcttaactcaggacctgccactcatcaaacactgcttttactgtcagaatctgctagaaagaccgcttggactacgtgaagccactagcacactggacagctgcaccttgagaccggggagatgctccgagatgtgctcgcgaacaaggccacctgacccgggcactgggctatttcctcgggttcagtcccgcacacttgaggttcagcctggcagacgttggctccagacagcgtttggacccgccgcctccaccacccaaagttccgtgcgggatgagactgtccgcggaagcgagggtgtcgctcgcccccgggcccgggtccgccccgctccgaggcctgctcggaagaaagacctcggtgcgcagttctcgtcgcgctcccacacctggtccgcccagtcggaactcacccctacggggccgcggccggtccctgagcctgagaagaaacagcaaccggcgctcgccagaagtatcctcacttcctgtgttgacgcctaatgatgatataatagccgacctctggcccagaactcaagacgacaggggctcgctctgtgcggcacttcctgtgtctgcgcgggatgatgacgcataaaacagcgcttgctcaggtccaggactccaaaagaaactgcgccgtgagctgcacttccgacttcggcgcgggccggggcgccgagcagagcgacgccgacttttggagcagtttgcgcctgcgcggaacgcgtggccggcttccggaatcctaccgggacttttccggtagcgaagcccgcgcctgtgccaaggcttgcgagcagaatgccttcgcgatggacgcccgcattccacccccttgaccgctgggacccctagtggcgggtgggtggagcgcgctccatttacctgctggttacctcgtgaggcgcctcaggtctgtgtgtcttgtaaaggccgatctcggaatttaactctgaaccttactcagaaacaaagcagggagagctcttacgatgtgattttattttatttattcatgtatttacttttgagtcggagccttgctctgccgcccaggttggagtgcagtggcgtggtcttggctcactgcagcctcctcccgggttcaaggaattttcctgcctcagcctcccgagtagctggaaccacaggcccgcgccaccacgcccggctaatttttatatttttggtagagacgaggtttcgccatattggccaggctggtctcgaactcctgacctcaagtgatccgcctgcttcgtcctcctaaagtgctgggattacaggcgtgagccaccgcgccgggccttttacaatgtgattttgaagctgacactggcagtgggtcctcaaagtgcagactcactgggtatggtgcttcccccaactcccagggccccactccaaacccatggattcagagcattgcaggagaagaggataaaacgagcaattaattccctttccatatgtcaggttttcctcttgccttgaaaagtcacagaaaaatgctttagacatctgaatctcaggaaacaaacaatggaagataaacatccgcatttactgggcctgaaatgggaaaatgaaagatgtggcaagaaactgacaagggcccaagaagggcgatgggtatcggaattcttttcatcccggaatgaaatgctgcttgctttgtgtacccaagctctttttttatttttatttttttgagacggagtctcgctctgttgcccaggctggagtgcagtggcgcgatctcgggtcactggaagctccgccacccggattcacgccattctcccgcctccactccattcgcccgcattaggctcctgagtacctgtgactacaggcgcctgccaccatgcccggctaattttttttttattttcggtagagacggggttttaccgtgttagccaggatggtctcaatctcctgacctcgtgatcagcctgcctctgcctcccaaagtgctgggattacaggcgtgagccaccgcgcctggcctcccccaagctcttaatgttgcttcctgagttcttggtaactggggaaatctccctatttttttatttttatttttttttgagacggagtcttgctctgtcgcccaggctggagtgcagtggcgcaatctcggctcactgcaagccccacctcccgggttcaacgccattatcctgcgagcctcagcctgccgagtagctgggactacaggcacccgccaccgcgcctggctaattttttgtattttttttagtagagacggggtttcactgtgttcgccaggatggtctcgatctccttaccttgtgattcgcccgccttggcctcccagagtgctgggattacaggcgtgagccactgcgcctagctatttttattttttctgatagggagactcgctctggcccaggctggagggcagtggcgggatctccgctcattgcaagctccgcctcctgggttcacgccattctcccgcctccactccattctcccatcttaggctccagagtagctgggccaccatgcccggctaattttttgtatttttagttgagaccgggtttcactgtgttagccaggatggtcttgatctcgtgacctcgtgatctgcctgccttggcctcccaaagtgctgggattacaggcgtgagccacagcaccctgcccttttttttgagaaataagtctcactgtgtcacccaggctggagtagagtgacacaattttgggtaactgcagcttccacctcccaggttcaagtgattctcctgcctcagcctcccgagtagctgggactacaggcgcccaccactacgcccggctaatttttttgtgtttttagttgagacggggtttcactgtgttagccaggatggtcttgatctcatgaccttgtgatctgcctgccttggcctcccaaagggttgggattacaggcgtgagccacagcacctttttttttctgttttgagagaaagtctcgctgtgtcacccagactggagtgcagtggcacaattttgggtaactgcagcctccgtctcctgggtacaagtgattctcctgcctcagcctcccgagtagctgggattataggcgtgcgccaccacacctggctaacttttgtatttttagtagcgacagggttttgccatgttggccaggctggtcttgaactcctgacctaaagtatctgcccaccagcctcccaaagtgctggaattatagtcatgagccaccgtgcccggccaaaaatctccagtttacccttcctttgtgaaatctgttgagtacccaaatgcagccactcatgtcaaaccctaacaaaatcgaccccagagcccacgaggagggggtggcctcgcacttgcgcttgataggagctgccacaaaggcctttcccaaccagaactttgggtccagccacttctgtgaagagcctctttgctagcaatagccagccccaccggtgaacaaagtagcatgaacaccagaggtccacaaggaagaaaacaaagcagtccatatttaacatttattttactttgctgagcaagaatcatagacagctactaccacggctgcttcgtttggacaaaaataaccaggaggcatccacgggattagttacacggtatcaacttaccaccacagcagaatcaacagtgactcgctaattaacagaaccgtttgctagaaagcactaatctagttatataaatactgaaataggtcacatgcaaaacactataaacgttttgtgtgatgtacttttagttctccatagttttgtttggtataaaggaaatataatttggctgtgacgtagactgttgatgtaattttcaagttttcctgtatggggaaagttgccctgactgtggcccttttcaaggtggagcctccaacaccacgttggcagattcagactccgtgaacagtctaaatgagcaagtcagctgaatgccactttcagatggaagggaaatgagatggaaaacaacaaaaaaggactgccaggcggaacagtttccaaccgagttttcgttgagtgaggatccagcagccatcaaactcaaacataggggcccgcagggaaactggaggaaatacttcagagacagcaaagctgaaggtttctgtgctctgagggatccgagagtggatgtcccactcctgtatcctcagccagacacagaactagccagattcattagggaagctcagatgctctcattctataaagtaaggcccccagcagggcacgtacatacattgggaaagaagaaaccccttagtaccatgttggtcaaaggcaagagagagaattctatttccatctggaatgtcattcttgtttacttcttccaacagtgaaatacttccaggccttcgaaaggccatcctttggacacatgtaaaaagctgtcttgttggcccgttattcccactgacccgtctgagtgatcacccaggagcgcggcggcagcaagcagagctcaccggatttgggacaaggattttaaaggcagctacaaagctgagctctatttgctgatgatagtctctgttcagctgtttaaaatgactgtctgactcaccatggtaatttttcacaaattaaaaacacattttgggttgtgcaacagtgttctcatctttccaggcaggcagattattttaatgctgttatacagggaattgggactctcggattttcttttttaacctttttatgcctttcagtaggggaagtttccttgaaagttagagagctgcaaatctctaagtatcaatgtaaagaagccgatgacccaattcggaaggtggttcaagtgttctgtttgtttacaaaggcacagaccacgaccatggacacacccagtggaagtaaccacacccggtgtgttcctagaagctcatctgtgacagttcaacaagaacttactattctagaaaagtattacacaaagttatttaaaaaaatgtctgtacaatcgttaacacggccaagccaggccttgggttttgcctcttggtgtccagctgtgctgggaatgccatgaagaccagcggctggaaactgacttgggcatggagaagagactgagggagagggaggggacagcacgactgagcaagggcacagtgctggctgcctcatgggctccaggctccttctgccaggatgaggaagaggccccagagcagcgttacacaggaaatcaacctatttgctaatcctttggaaaaacgtttgtttctggtccacaaacagaaaatccaaacaggatggcagctccttgtgagggtggaggggagggcaccagattctgtgcggctggaaattccaaggtgctcagaaccaggcgcctgcacctctccttatgccagaccacaatcttcaaagaggccggcagccatattctcgatggggaggtggacaaggccaccctgggagttgctttcaatctgtcctcacaaatcaacaactccccgccacctccagagcattttctaatagtgtttgtttttgagacggaatcttgccctgttgcccaggctggagtgcaatggcacgatcttggctcactgcaacctccgcctctggggttcaaacaattctcctgcctcagcctcctgagtagctgagattacaggcacccaccatcacacccagctaatttttgtatttttggtagagacagggtttcatcatgttggccaggctggtctcgaactcctggccttgtgatccgccatctgcagcctcccaaagtgctgggattagaggcctgagctaccgcagccggtcttctattagtttttgaggaaagcagaaaaaaagaaatggaaacccagggaaagtcacgtgacaaaacatcttcgcagcgcagtgagcacacacctggcctgtcctccacacacaggtcagcggttttatagaagcggctgaagcaggtgtagtagcccacgcctatattctcgacactacaggaggctgagtgggaaggattgcttgagccgaggagttcaagaccagcctgggcaacaaagcgagagcccagctcaacaaaaaaatagccaggcatggtggcacgtgcctgtggttccagccacatgggaggctgaggtggatcacttgagcccaggaagtcgaggctgcagtgagccaagatcatgccactgtactccagcctgggtgacagacagagcaagactgtctcaaaaaaataaaaaggttacttgtgggttaaaaagcctcacttcggtccatcatcatggcagacttttttgagtaggtagaagttaatgagtcagaattattgctctgtttctgaacgattttatcttcaggaggggctatttttgtatttcccaggtgagaagccaaatggaaaaccagtgaagtgaccatgggtgccaaaggcctaaagagcaggcagggaaatgagactcgggaccactggagccccatgctgcctctgacaagccctggagctctgggtctcaaaggctggctggcaacaggctgcaccgggcatgggaatccgccggctgcgagattgggggtaaagagctcagacatggtcagaagcctctgcctaacacacggctccagtagccactcctcaggcctcctgcgccctcgggggtgcgtgacacaggaggatgagttgagctggctggtggccccagtgtgccgtactactgtcccttggggagagtgggacagggtgggcgcctgacacacaccacgcgccccagaaacattcagtgtggacgtttcctttttcagcaaggacggcgcccaggtaaacgccacgtaacccaaaccatcaacactgcagcgtcctgcccaaggctcacgtggggaaccggacaggtgctagatgatgataggaacggtgggctctgagggaggacagacaggctcaccccacggggacctcagaacagcctgcctcatactcagagtccaaaaaagaaaaggaacgtacacatctcctcccaagttaaacacgagaggtttgtcctcaacctcagggctggaaaccaccacaggtaggaggctgggcacgggggctcggcctgtcatcccagcactgtgggaggtcgggtgctagaatcccagcactgtgggaggccaggcacgggggctcacgcctgtaatcccagcactatgggaagctgggcgtgggggctcagcctgtaatcccagcactgtaggaggccgggcgccgtggcgcatgcctgtaatcccagcactgtggatggccgaggcaggcggatcacgaggttaggagttcgagaccatcctggctaacacggtgaaatcccatctctgttaaaaatacaaataactagctgggtgtggtggcgggtgcctgtaatcccagctacttggaaggctgaggcaggacaatagcttgaacgcgggaggaggaggctgcagtgagctgagatctcaccactcactgcactccagtttgggtgacagagcgagactctgtctcaaaaaaaaaaaaaaaaacaagaacatctcccacacactcacagtgcctttgtagccccagggaaagcaatcccttaagatcatttgttgggtgaaaagggtaccaagtacacagtgttaggaccgtgcaaaaaaagggtgacaggaagtaccctttgcaaactttccataatgtgtacttaattcactgctcttataaaatgaaattaaataaaacaaaaaaatactactgaaaaataattgggcaacatgcggtggctcacgcctgtaatcccagcactttgggaggccaaggcagacggatcacctgaggtcgggagttcgagaccagcctggccaagatgatgaaaccctgtctccactaaaaatacaaaaattagctgggcatggtggcaggcacctgtaatcccagcttctcgggagactgaggcaggaaaatgtcttgaacctgggaggtggggttgcagtgagccgagatcgcgccactgcactccagcctgggcaacagcgtgagactctggctccaaaaaaaaaaaaaaaaaaaggaaaaataattgggctgagtgtggtggctcataattgcagtcctagcgctttgggaggccaaggtgggtggatcacttgaggccaggagttcaagatcagcctggacaacacagcaaaatcccatctctcaaaaaaagtaaaataaaataaaataacaaaaaacaaaaattagcccagcgtggtggtggacacctgtagtcccagctactcaggaggctgaggcgagaggatcacttgagcagggaggcggaggttgcagtgagctgagatggcaccaccacactccagcctgggtcacagagcaagactctgtctcaaaaaaaaaaaaaaagttttttttttttgaaccactgctaacaatcactaatgttcactaaaacactaggcttcaggagcatttggaaataattcctgaccgcacaaagaaacatgctggtgagagacagtgaccaagcccaggagaccaccatgagttccagaaaaagtgagagagagcggccacttttcctgtctcggagatacctcctactcaggacgcaggaagcatggggcagggcagcgccatggacaaggcgactcggtgcagggcctgcgggacctgcaggtgagaggaagcacaagctccagctcctcagctgtggaacgctgcgtgcgtggtgcacagctaccagctcggatgggtatttgagaatttaccgcactgacttggaccagacggaaagcagagaagagggagagctacacctgactgtccaccattcccgccagccccaacgtcggcttttcacttcatgtttggggacaattacacctcctcatgacagatcagaagtttcagaaaaaaggtccgctgatttccgcaacagggtatgaggtggccagctgctgatgccagctgcatggactcctatacttgctggtaacataacctcattcctttgtatttgccaccaaaaagtctccagtctttttttttttttttttttttttgagacggagtctcactctgtagcccaagctggagtgcagtggcacaatctcggctcactgcaacacccgcctcccgggctgaagtgattctgatgcctcagcctcccacgcagctgggactacaggtgcatttcaccaggcctggctaattttttgtgttttagtaaagacagggttgcccatgttgcccagggtggtctcgaacccctgagatcaggcaatctgcctgccttgacctccagtccacctggctagtctccagtctttaaattgcacctttggccgggtgcagtggcttgcacctgtcatcccagcactgtgggaggccgaggcgggcggatcgcctgaggtcaggagtttgagaccagcctggccaacatggtgaaaccccgtctccactaaaaatacaaaaattagccgggcatggtggcacgcgcctgtaatcccagctacttgggaggctgaggcaggagaatcacttcaacccgggaggcggaggttgcagtgagccgagatcaaaccaaagaaatccagctctgggtgacagagcaagactctgtttcgggaaaaataaaatacataggcagggcgcggtggctcacgcctgtaatcccagcactttgggaggctgaggcgggcagatcacaaggtcaggagatcgagaccatcctggctaacacggtgaaacccagtctctactaaaaatacaaaaaaaaattagccgggcgtggtggcggacgcctgtagtcccagctactcgggaggcagaggcaggagaatggcgtgaacccaggagacggagcttgcagtgagctgagatggcgctactgcactccagcctgggcgacagagcaagactccatctcaaaaaataaaataaaatacataaacaaataaattgcagcttcattcaatctgcccagttacagaagtggaaagaagctgaaggatcctccccgtttctagagctgcaccgcatggcacaggaagcagtggccacaggtgtctgttcaagttcaaactgacagcaatcagcttgaattccgaatctggttcttgttatattctccacatttcaagggctcagaagccgtatgtggccagtggctcctgcactggacagcccagaagagaccattccattcctgcagacaaaactagtcgcagcaccctgctattctagacagaaagcactcaatttcaaaaaccttcaaactcagagacttctagtggagatttccctaaatacctatttcacacagtttacggtttattttacagtttctcatttgtttttttgttttatttattttttttgagaaggactctcgctcccatcccccaggctggagtgcagtggtgagatctcgactcactgtaacctctggctcctgggttcaagtgattctcctgcctcagcctcccgagtagctgggattacaggtgcccagcatcacacccggctaatttttgtatttttagtagagatggggtttcaccatgttggccaagctggtcttgaactactgacctcaagtgatccacttgccttgtcctctcaagtgctgggattacaggcatgagccactgggcccggcctatcgtttgcatttcaaacagcatgggtataaaatagcctagtaattacactgcatagccacagtcatccccgtggaagagaatcacatgtgtcccttataaaaatacctagatttctggtctcctttgtaaacaacctggacacactcaactcttgggaagttcctctgctcacctgaaagtcaccggggagattttccccatgagggcgtacgccgtgacgctctgaaggtggaacaggactccgtctgtcagaagcagcagcaccacgtcctggttgtagctgaagctcttcccgctcctcccgatcactgggacgtcctatgtggcaaacaaaagggtactctattggtttccattttccatttactaatcatccaccacgaacacccagcgccactcctgcccagaaactgggtaaagctgctgccactgaggacagccctgaaaatgcctcgaggggacagctgaactgtgcactcatccattttctgttttttgtttgtttttattattttttgcactaattaattttcaccatgcagatgcaaatggacaacaagcacatgaaaaaggctgaacatcaccatcatcaggaaaatgcaacagaaaccccaatgcggggccgggcgtggccagtctggccaacacggtaaaacctcgtctctactaaaaacataaaaactaaccaggcatggtggtgggcgcctgtaatcccagctactcaggaggctgaggcaggacaatcacttgaacccggaggcggaggttgcagtcagctgagatggcaccactgtaccccagcctgggcgacaagacagagacttctctgggctgccagaggctccggaagccgggtgcctcaggccgtggcagttccgtcactctccaacgcctcccccacagacttctttttgctaaatggtatcaagattttctcgttgttgtcagcaagagagttggttttctaacatctcatcgaccatggctggaggtcaaatcgatgttttaaacttgctggaaataaacggttcctttcttgcatggctcgatgagcaataaggttcctctgtgtcattttgtttacgatttttaggattgctttttaaagccggacacggcggctgatggctgtaatcccagcactttaggaggccgaggcaggaggatcacttgagataaggagttcaggaccagcatgggcaacacagcgagaccccatctctatagaaaacacaaaaatgaggctgggggtgctcatacacgcactgagggttgaccctggtgttcttgccttcttagattcttctggagctggagatgaactcggacctcaaggcccagctcagggaactgattattacagcagcgagggaaactgaagttggtggtggtgagaaagttatcatgggcaggtacagcagctcacgcctggaatcccagcactgtggggagctgaggcgggaagatcacgaggtcaggagctcaagaccagcgtggccaacatggtgaaaccccgtctctactaaaaatacaaaaattagctgggtgtggtggcacgtgcctgtaatcccagctactcagggggccgaagcaggagaatcgcttgaacccgggaggcagaggctgcagtgagccaagattgcgccactgcactccagcctgggcaacaaagcgagactccatctcaaaaaaaaagagggccggctgtggtggctaacacctgtaatcccagcactttgggaggctgaggcgggcggatcaacgaggtcaggagatcgagaccatcctggctaacacaatgaaacccagtctctactaaaaatacaaaaaattagccggatgtggtggtgggcgcctgtagtcccaactactcaggaggctgaagcaggagaatggcgagaacccgggagatggagcttgcagtgagccgagatcgcaccactgcactccagcccgggcgagagagcaagactccgtctcaaaaaaagaaaaaaagaaaaaggccaggcgcaatggctcacgtctgtaatcccagcacttagggaggccaaggcgggcagatcacttgaggtcaggagttcgagagcagcctggccaacagggtgaaaccctgtctctactaaaatacaacagaattagctgggtgtggtggcagacagctgtagtgccagctacttgggagtctgaggcaggagaatcgtttgcacctgggaggcagaggttgcagtgagccaatactgagccactgaactccagcctgggcgacaaggcgacactctgtctcaaaaaaaaaaaaaaaaaagaaagaaagaaagaaaaaaaaaaaaaaggaagttatcataatctttgttcttcttctgccactgaaataattccagaacatccaagtctggctagtacgtgaattggagaaaaagttcactggtaagtatgtcgtctattgcttagaggaaaattctgcctaaaccaactcaaaaaaggtgtacaaaaaataagcaaaagcgtcccaggatccacgctccgacagctgcgcacgtcgcaatcctcgaggactcggtcttcccaggtgaaattgtgggcaggagaatccgcgtgaaatggacacagcagctcacaagggttcattcggacaaagcccagcagaacaacgtggaacgcaaggtccaaactttttctggtatcgataagaagctcacagccaaggctgttaattctgaatccccagagttcccagtttcaattgttaagaaaaatgactaacgtatactcacagtgaaaaaacaaaaagacacacaaaatacaaaaattagctgggcatggtggcacatgcctgaggtcccagctacccaacaggctgaggtgggaggattgcctaagcctgggaggccgaggttgcagtgagtcgtgacctcgccactgcactgcagcctgggcgacagagcaagaccctgtctcaaaaacataaaaaaaacaaaagaaaaaaaacaaaaaaaaaccagagttgacttttaggctttgattttgttataatcacctaaacgtgtgtgcgggtctcaagtgcatgtggggcaagcccaaccccatcctggaccctcggcctcctcccgtccccaaaggcagacagacacttccctcggccttaagatcttgtcgtttcttaaataagcgaacacgtgtgcacccccacactccgttcaagatgccgcgctctgtgggcgcctctgctcctcgctggttttcatgcagccacactgggtacgcgacatggggctgacatgtcactggaaatcgcctgtgagtcattaagaggtgggagaggcaggagcctgggttgcagctgaggtcaggggctggggcccaggacaggcctgtggtggcgggtgctggggaggctgtggggtgctggcacaggagggcccacggaccaggggccacggccgcctgtatggtgctggccgaaggcggcccccgcccgtcctcttcggatcagtgattggcacctgcagtaatcttgcttgccaggaatctgcccagcccccacctgtctccccacccagttagggccacgagacacaaccctgccctgacctccgcatgccagtgtgagaacacctggcagacgccaggctccaagacacccccgcacatgtgaccgtgagagaagtgaaggcactgccagtgtgggcaccactctgagtggtcctcgcggcagagccccatggcaggcagcagagacgggcaccacggatggaggcctgggatggtggggcgcaggcggaggggtggggcccagggggcctcacctgtgtactcccccagaatcatccgagacatgatcaccgtgaagatgggggcggagctcttcaccgtctcagcaaacgaaaccgccacatttttcaggctgaccaaacccaaaaccacagttgcaaacctaaaaatgagccaaaagcaccatcaccttagaacgagtctgtctgcctgcacccaccgggcaggctctccaaggggctcgctcgctcggttggcacgtcggcccctctccgcccacctcctcatcaccaacatggtgcctggacccgcttctgtgacgctttaggtcgagcccccaggaaacggcactgcgtccaatgggaagtgacttctgccaccccttgaaaacgtcccagagacaaggaggcaccctgtcctgagaccaccagcccggaaagaagctgactgaacacacgtggcagtgagagccacgaagccacattcatttggtgtcctgaaatctggacagccctggtgcttttataaagtctgcactgaaaactcaccagccagcagagtccccgctctagtaacgagagggactttacatttaaagaaaaagagacactcaaccaaaaccaggagattctttacctcatcagacccacaaacagcatcgtcataaggaagttgggtgggtaggaaagccgggccttgtgctgatataaacagcaaggaacgagggttttcacacacccgataaccgtggtggacagcatctgcaccgcacctgcgggagggagggggccgaagacaagagggagaatcacccctcccgtgcctgcagtgggctccacccccggtctcccatcctgacctgggctcccccggccctcccgggtggttgctggctgctccctgtggggtggcaggtggccggcttccaccctgcccgagccgccgcctacctagcatgctgggctcgcctcccagcagggacaggatgtacttgttgaggaagagcgtgcagaagctgaagaagaaccacagcgtgaggtagagcagcgcccgcgagctccacacacccaagtctgactcgatgaccgtggtctccgtgatggtgacggtcagtacgttctcatctgtgccgccgtcgctcttggcaaaaacaatcttctcacttcggtgaccaaacagagagccccagctgagaggcgacctgcctttcggcttctcttcggagccaggaaccagctcttccagtgctggggttttcaccgaggacgacatgctgaagccacagccacgaacgattttacctccaggctgggcagcatgggtcaccgtgaccgcccgggggtggggccgcagcagggactccgggcgccaggaacgaggccaccagggcctctcccaggcaaagcgtagaagcagacgctaaaatattaagaaaaggaaacacatcacccgttttgaacatttaatgtcctcaaaggtttcaaccaccaatttaaaatcactttgaaaatgcaattgggccgggcacggtggctcacacctgtaatcccagcactttgggaggccgaggcaggtggatcaccttaggtcaggagttcgagaccaccctggccaacatgacgaaaccccgtctctactaaaaatataaaaactagcagggcatggtggccggcgcctgtaatcccagctactcgggaggctgaggcagaagaattgcttgaacccaggagacggaggttgcagtgagccgacatgataccactgcactccagcctcagtgacagagtgagactctgtctcaagaaaagaaaaaaagaaaatgcaatcgttcactgtccaaagatttttagcaattgaatcccgtttttctctgcgcgtgttggcggatccttgctcttgagagacggtctcctggcacacttgactgtcgtcctggcagacctggggctgtgggtccttcacgccctgcctggcagctgcaccttctcgatgggctttgtggctgccgctgccgggtgcccaggactaattccatgctactttctttttttttgagacgggagtctcgctgtgtcgcctagcctgaagtacagtggcgcgatctcggctcactgcaagctccgcctcgcgggttctcgccaatctcctgcctcaggctcctgagtagctgggactacaggtgcccgtcaccacgcccggctaattttttgtatttttagtagagacggggtttcacagtgctagccaggatgatctcgatctcctgacctcatgatccgacctccttggactcccaaagtgctgggattacaggcgtgagcctccgtgcctggtcttttatttttttgagacagagtctctgtcgcccaggctggagtgcaatggcgcaatctcagctcactgcaacctctacctcccgggttcaagtgattctcctgcctcagcctcctgagtagctgggattacaggcacccgccaccatgcccagtgaatttttgtatttttatttcattttttagatggagtttcactcttgttgcccaggctgcagtgcaatggcacgatcttggctcaccacaacctccgcctcccaggttcaagcgattctcctgcctcagcctcccaggtagtggggattacatgcacgtgccaccaaaccctgctgattttgtatttttagtagagacgggttttcgccatgttggccaggctggtctcgaactcctgacctcgtgatctgcccacctcggcttcccaaagtgctgggatttacaggcatcagccactgtgcccagcctcccttttcttttttttttttggctgactcatgggttagaattctggattgggcaaacacataaacattttgtacatgacgagagccagatttcatcatgtgagtgaagcgagatgcaaacacgaaaggaagtccttcaaggcagccttgtagtgaaaaaataaaaataaaaatgaaaaaaagaggctgggcacggtgactcacgcctgtgatcccagcacttcgggaggctgaggtgggcggatcacaaggtcaggacatcgagatcctcctggccaacacagtcaaaccccatttctactacaaaaaattagccgggcatgatggcgcgtgcctgtaatcccagctactcaggaggctgagccaggagaatcgcttgaacccaggaggcggaggctgcagtgagcagagatcgcgccattgcactccagcctgggcggcagagcgaaactctgtcccagaaaaaaataaagcttagaaacaagaggctatgtagtctcgagatagatccagccctatgaggcacatgtcaatcacagagggaaagctatgcacgcacaaagcatgtgtgaatcagagagaaagctatgcacgcacgatgagtagaagacaaacacgtcctgcaaggagacggaggcgcagggagggggtggcagccgtcctcccaagacatgaggacttctagttcagtctgagaccttggtgcagggctgggcgagtaaacaaatgcaaaagaataaggacctcgaggtcgggcgcggtggctcaagcctgtaatcccagcactttgggaggccgaggtgggcgcatcacgaggtcaggagattgagaccatcctggctaacacagtgaaaccccgtctctaccaaaaatacaaaaaaattagctgggcgtggtggcgggcacctgtagtcccagctactcgggacgctgaggctgagacaggagaatggcgtgaacccaggaggcggagctttcagtgagccaacatcgcgcctttgcactccaccctgggcgactgagcaagaccctctctcaaaaaaaaaaaaaaaaaagcaaaacagaataaacatacgtaggccaggtgcagtagctcacgcctgtaatcccagcactttgggaggcagaggcgggcgtatcacctgaggtcaggagtttgagaccagccttgccaagatggcgaaatcctactaaatacaaaaattagctggacatggtggtgggtgccagtagtcctaagtacacaggaggctgaggcacgaggatcgcttgaacctgggagacggaggctttagtaagctgagattgcaccactgcactccaacctgggtgacagagcgagactgtcttaaaaaaaaaaaaaaaaacaaacaggtctggtgtacgcagaatggaggcaccacgaattgctgaagaaggaaactttattcagtctatgataccaggacagttgtccatgctgccaggcaaaaagaaaaactggattctgatctcattatcagtagacaaacagcgacaattagtaacactgacacagccctgactgtgctgctggagggtccgaagcactctctgcacagcggtgaatccgcacaacagccctctggggaaggtgctgttatcacccacgtgagacacacgaaggaaagacacggcttcgcagcagcagcgtcatgattcgaacccaggcggcctgctcttatgataaacttaaatgtgtaaaactttatgctcaggaaaatataagagaatgtcttcctgaccctttttggggtaggacaataatttctctaaccaaaccccaaaagcatgacccattaaaaaaagggtcaggtggactaacttggctaaatgaagaattctgtttcaccaaagtacactacaaagtgggccaggcgcagtggctcatgcctgtaatcctagcactttgggaggccaaggtgggcggatcacttgaggtcgggagctcgagaccagcctgaccaacatggtgaaaccctgtttctactaaaaatacaaaaattaaccaggtgtggtggtatgcacctataatcctggctacttgggaggctgaggcaggagaattgcttgaacccaggacggggaggttgcagtgagcccagactgcgccgctgcactccagcctgggcaacagggcgagactctgtcttaagaaaaaaaaaggccagacttgtctcacgcctgtaatcccagcactttgggaggctgaggtgggcggatcacccgaggttgagagttccagatcagtctgaccaacgtggagaaaccccatctctactaaaaatacaaaattagccaggcatggtggcacatgcctttaaccccagctgctcaggaggctgaggcaggagaatcacttgaacaggggaggcagaggttgtggtaagccaagattgtgccattgcactccagcctgggcaacaagagcaaaactctgtctcaaaaaaaaaaaagaaaaaaaatatatatatatatatacatatacacacacacacacataccacaaagtgaaatgaacagccacaacctggcaaaagatacttgcaacatgacaaaggattaataaccagaaagtataaagaattcctacaaaccaattagaaaaacaggcaaaaaaaaaaaaatattggcggggcatggtggctcatgcttgtaatcccagcactttgggaggccaaggcgggcagatcacctgaggtcaggagttcgagaccagcctggccaacatgatgaaactccgtctctaccaaaaatacaaaaattagccaggcgtggtggcaggcgcctgtaatcccagccacgcaggaggctgaggcagcagaatcacttgaacctgggaggcggaggttgcagtgagctgagactgcgcctgctccagcctgggtgacacagcaagactccgtctcaaaaagaaaagaaaaaaaaaaaacaaaacaacatatttcacagagaagaatttatgtttttggagaaggagtttcgctcctgtcgcccaggctggagtgcagtggtgagatatcagctcactgcaacctcaacctcccaggttcaagcgattcacagaggacaatttctaaaaggcaaataagaagcaggaagggtgcatgctccttctctactgccctgtaacagtcattccacacttaccacctcaaaacaacaaatgcttttgatgttggctcctgtggggcagcaatctgcgggaagcttagccaggcacctctggcttaaggtccctcctgaagctgcagtcacaccatggaccagggctgtgacctcatccgaaggctcaactggggctgaggcccacctctgagctcactcaggtggacgctggctgggttcagttccttgctggctataggtggaaagggcccccaccagtttcttgccagcttctccacaggacgccccacagcctgacaggagctttcatccagcaagctcatcagggagtgggagagagcagccaggacaggagcccaggcctttctgaacctcatctcagaagtgacatccttcccttctgctgtctgggcacagctccccgggtggagcccgaggactagaaggaaaagaaaacttggatttaaaatgggataaagccataggagctgctcgtcccaccacaggaatctcaacgccgggttactgacaaagcgtcactttgcacctcgtccaactgtgcagacctctcctagccaggcccctgcaccagaggttaagaatccgtgcccctggtcaggaagtccaggtgggttcaaacggccagcagggaatttcaggcaaaatgtgtcccaaatcttcaaaccacgccccagaactcagacctccccctgggagttcgtcccaaggaaaccacctgcaagaggctcaggctgcaggggacactccgcttccaaaacccggaagctggagaccacacaagtgcccaacgccaaaggcaccccgtggagggacgccctgtgccctcccccgaccaggtgacccgctgcgccctacacatcttcaccaggaaacatctgttatcgatgtggacgaagcgcagcctgcactcccagatccgctcattttcgttctgccctccgttttacgattcgcctacactgaaaatgcgtgagtggagtggaaagccttcctactcctgcctcagcgaccccttctaaaatactgcctcgtttggcctgaaaatgtgatttgcaggcttcctgagcaaagtagatttcactccattaaagaaaaaaaaaaagaaaaggcaccgaacggggctcggctgtcgggagttttgctttagttttttgcgtgttttgttttgtgtttttttgttgttgttgttctttttgcggccacgcacaccgcgttcccaggcttcagggcgtgggggtcgccgtggactcccggacgtgaaaacgcttaaagccagctgggaaaaccccaccagcgttttccgcgcacagcgccagccataggaaaggacccccaggagcgaatccgggcagggaaaccccggacgcccgcacactcagcatcagtaccggcacccagcacccagcaccgagcaccgagcacgcagcaccaagcaccgatcaccgagcagagcaccccgcacgcagaacccaccgagagcctgatgcagtctccgccgcaggcatagcgctaggccccggcgccttcacaacaaagggacgctggcgggcggggcctaagaggtgcgcggtggaggggccgggcgcgaggccgcggagacagctcggagctcggcactggggagtggcacagcgctggcggatccaggtgggcttcacggggcgcccgcgggaccggaaatgacgcgcagaaccctgcatcgggctcctcgctgccccgcgggcgccgctcctcagtgccccagagccacggagccggggaaacgcgccgcggcccacaacgcccccgcggctgcccgttggttccgcccgagccgttctactccaggcagacgggaggagaaacacggcgcgctcagcgtcccctgccccgttggttctgctcgggcccttccactgcaggccgacgggggtggaaacacgcagttttttttttttttttttttaaggtctagggtaacacggggcttttaagtgcctctccgcggccgcctggtggtccagcccgggccgctgcagtgcagccacacggggagggacacggcgcgccgagtgctccgggcggccgcacgttggttccgcccgggccgttccactgcaggcagagggagaggacgacggtgcgcgtagtgcatccccgtggcccgttggttccgccggggccgttccactgaaggcagaaggggggggaaccgtggccccaccccccgcggcagcccgttggttccgcccgggctgttccaccagcggcacttcagggcgggatcggccagtctgtggaggcagcggcctctaagccccggagggtttactgcccaggtttgggttccaggaataagaaatccactgaataggcttaacttagaagacacaaaggcgcctcctggcggaagtggccacgctccgcccagcctgagggaaagctgctctgacagctgggcccggagctgcggggggcggggccgccgcgcggggtgaggactcgcctcagggcgctgattggctggtggcgcgctccggggcggggccttcgtatccaggctggcgtcggggctgccgcgggacatccggagcagacacccgcgggcgcgcctgcggccccgaggacccccggctccggagcttcgtcgagcgttttcctagcgttactttcccaaataattttcaggaatgaagttacggctaaagggctctttagagattacttttgggccgggcccggtggctcacgcctgtaatctcaacactttgggaggccgaggccggcgcatcacgaggtcaggagcttgagaccagcctggtatggccaacgtggtaaaacgtcgtctctactaaaaatacaaaaattggccgggcgtggtggcgggcgcctgtaatcccagctactccggaggctgaggaaggaggatcacctgaacccgggaggcggaggttgcagtgagccgagatggcgccactgcactccagcctggcgacagagtgagactccgtcaaaaaaaaaaaaaaaggaagaaagaaaattataaaatgaagtgaaattaacgcagtggagtgccacctgcctgctgcctgagttcactatccacacggagttcataaatttgagagcagtttacaaagtagattctcctactttccaggaaacccagaaatgtctggtgatttgcccaacagtctcagctgttgtggtcagcagggccgctgtggtatccaaatgatttcaaaagcagatttataaaaagtactccttgtttttttttgagatggaatttcgctctcatcgcccaggttggagtgcagtggcacgatctcagctcactgcaacctccgcctcccgggttcaagtgattctcctgcctcagcctcctgagtagctgggattacagatgtgtgccctcacgcccagctaatttttatatttttagtagagacagggtttcaccatattggccaagatgttctccatctcctgaccttgtgatctgcccgcttcagcctcccaaagtgctgggattacaggcgtgagctaccccacgcccggcctttatttttttttgagacggagtctcactctgtcgcccaggctggagtgcagtggcgcgatctcggctcactgcaagctccacctcccaggttcaagagattcttctgcctcagcctcccgaggagttgggatcacaggcacccgccaccatgcccagctaattgttttgtatttttagtagagacggggtttcaccgttgttagccaggatgctcttgaactcctgacctcatgatccacccaccttggcctcccaaagtgctgggattacaggtgtgagccaccacgcctggcctctcaaagtttttatagcaaagccttacatttcatgaggaaccatgcattttattttatttttgagatgggggatctcgctactttgcccaggctgggctcaaactcagggctctctggcctcagcctcccgagtagctgggtctgcaggtggctgtcaccgtgctgggcctggggtgtgcgtattaatgattttggaatagtgtctggaagcctgtgtgccttcctctcttcctctccccagaaggacctcccacctcgtcctcccaaagtgttgggattacaggtgtgagccaccatgtcccctctctttgctattttgcctgggaggagtgtattaataattttaattttaaatttctttgattatgttctagtttgattattgatcatttacttcttagctatttatattcttccttgagtcatcggtttctgccctttgacaatttttctgtgaatgttttgtgttgattatatgagctttgactgtattgagaacatccacgcattgtattattgcaactgttttcctagttgagaacatcgacctgctgtattattgcaaatgttttcctgcttgcatgtagtcatttgttatgcatattaatgaatttctatccacatgacgtggagtcagttaggaatcagttaggacgccctcgctgtgtgggagactgatgggtccaggcgctgtgcaaaccccgcctccaaagtgcatccttggctcactgggaccttccgggttgtgctgctcttgcttcacagcctctctgggtctccctgccgtctgctgacctcggggcagggtctacccaggctgagcggcccatgggctgtgggattcctttcctctgccttcaggtcctggatgatgtagaaggcaggaaggaaagcagtcatggctagctctgtcctgcccccttcggggtcccccccggcccacaggctcctccttgtcccccagccagcctcagtctgggtctgggctcccgctggggaggagggtgagacctgccggcccaaaggagctgaagtttcccaaggggcgttgaggacagcagggaagtgtggggtgtgaactgaggccccagagaagggtctgtgccaaggccccatgggtggggaggaagaaggaagcgtccccacctggagacccagcctgcaggccactcggccacctgcgcagaagtaggggagcagcagccgctcatgcccctgcagtttgtcctcatcagcaggtggggaaactgaggccggggagttctccaggccaaggtcactcacgggcaagttcccgcagcctttggaccctccatacacgtcagggccgctcatgctttcctgggcccttcactggtttggaggaagcttcctgttgcccagagcgcactgcctgtctctgagtgtatgtgtctcagtggcgtccatgtgtatttttctctgtgtgtatctgtgtgagtctgtgtgtgtggtgtgtttgtgtctgagtgtgtggtgttagcgtgtctcagtggcgtccatgcatatttttctgtgtggtgtgtctgtttgtgtgtgtgtgaatctacgtgggtgtttgtccatctttttgtctggcctcctgtcccctctgcacagagcagctgggtggggatgctggtcctgggggcttgtcagcaggatgtgggcgtggggcagccctgggtgaggcctgagtacaggccccaggtgcctcctgcacaggggtggctgagccagctcctctgtggctcccgggtccccaccgccggtcactgggcaccacctgtcctggccacccactcctgcccaccctgctctccgcaggggcctccttcctctttcagctgtgcgccctggttgtggaggctcctaaggaggttgtggcctcggtttaccacctgccttggctccttggtgttgccagaccctgaaggcagcccatgccctggctgagatccttctggggcgggatgtgctggaagcagctgaaccacgtggtgatgtaccagctcctgctgtcccctacatccccagcaccgccagccttccctgggctcctccggccggctcctctaccctgtacccgccccaccctgctaccaccccccaaccagacttccagctccaggcagggtcgcagcctcctgggctcccagcaggacaggcctcacccagaccccgcaggagccatgggacttgggctgggtctttgggcctggctgcagcccctttggacctgacctgaggagacaccctggctgtgggaggcagggtgggggtgccgggcccagcacagaggtgcccagggtgcaggctggcactggcccggcagggaccgtggatgccgccgtttcaggctcgaaaaggtttccatgccccagagcctgagcccggcagcccccgaggatgtcttggggactctgtgctccccaaagccgagaaggttaggcttgacccacagcctcttccaggccggggaggcagaggcgctccaggtcggtagggcggggcccacagcccagggtttcacgtccccaaaacggggcagggtgctggaggcgcaggtgtccacagggtggtcgttttggtctctcctggacttgcacgcgtgtagtgcagactggctgccggcaaagccctgagccacattcatctgggccttgttaggacaacagggacggtgcggggtgggggggttgcggggcgcaggaccacgtcagtggagggagggaggccgatatcggtgcccaggctgggcccaggggccagcgggtcctcacctggcttgtggctgcccctgttaggcagcccggatggaggggctcttccagccctgctggccccgggaatgcagggactcaattccccctggtctcagtggctcttccgggagcaacacagcctgcccgagtcgacaccacccctcgggtttgagtcccttctgtctacccctacccccgccagggcactgcccccttgcccggaagaggcagcggcacccccagccccttggggaggatgccctgccggccccacactcggtggatgggcattttggggctaggatttaatgggggtgaccctgcccgacccctctatgttggttccacggcgtcagaagaaagctgttattaacccagcttattttctacaagtcttgtttattgaaaggatctgaaaagcgtaataaggctttcaatgacatttaatacattttcaagaaattaatatgaaacattaaaatttacttcaaaaatccaaagttttctagatcattcccatctcacgctgctttagaggtcagttcacaccttctgtgttcagatgagcggctggaattctgaacactgccgtcttccagccctaacgctgggcgctggtccctctctcctaagcccacggctgggcttcccctgtgcccagggtcatggcggacttcaagccaggccggctgcccagaatcacactcagggtttttggacgctcaagtccacagatgctgaggtgcccagacgagggtgagcagggagacacatgcctcggagaacgtgcccaggctgggccaggcggctgcgggaagctcctcacgggcagaggagaacgtcttgtgccttccttatcgatctccagcagatgagggcaacttcgtgtgcaaaactcagagagcagttactcaaaaaaaagacacccgggcagcagtaaccaggacaccagggtccgaccacggcctccacacacctgtgcccgtggaagacgcgggcgccggggtaggcagcatccacgtgctccacagctgccggtgctgggcaggctggagactcacgggagaggcaggaggagaatcagcgtgttgagtccctcgctgtgttagtgtgaaaaattctcattacagttgcaaataaaagggatcacgatcactagccccggaaaccctcatctcccggaccatcaggatcgcactgaacagaatggtcccctaatggtccctgaggacagcgtcttgcagaacataaatgtaaacattgaatggcagacgactcccttccccttgaaatcttcacaaaagtgtgtacgagaaagtatgtacatcagcacttcagaaagtttaaaagagtctctaaaaagtatatacaggatttaaactaccttcctgggagcagaagctacgtgaggaatgtgtgggtcgctggcgatgccagcccccttcccgctgagtgtcccagactcagtgctggcctcaagcggggagggctggatggcaggggacgcatccaaccctctccagaaactgagcagaacaaaaccgccttgccagccactggcaagaccatgctttcaatggcgcctccgccaggggcttccctgcagaagttttaggggaagaggtgcaggtcaaggggaaaagcatggcagctcaaggaaggtttttggctgagacatttattatcaacattgaaggacaggtcgagtcattctgactcctctgaatttcaaccgactgatttgcggaaaaatatcctggcatggaaattgcggcagctggaggccgcgctccagggacccaccgcggggtgtcagcaggacagaagcactcccagcccatttctcacgcttctttagaaatgcaaaaaaagtcagacattttaaaaaaacagctgatctggacaaaaggcagacccaggctctaacccagctacagaaaggaagtggccgtgccactgagacaggcggtcacagacacacgcagattggtctgtccccagagggcgcttggagggcagcggaaggattcgggcctggataggggcttgacctagccctcctcctcctcctcctcctcctcctcgaagtgggcttgcttcttccggacgttccaatgcaggcactgggcgaggctctcaaaccagtcgctcacggggtcccgcacacagatggaggggagcgggtagcatgaggtagtgatgctgatgctgggacgggagagcagcagcctgagccagggcttccagaaaggcccacccccggccaagaacccttcctccctccctccctgggaatggccgggactcttttcctgtggggccgggcagcccctccccgaggcaggcttgagcagtgccccatgggtgctgggacagagccatcccaggtcctggaggggacggtgcagggaactgacaaactctgccccagggccctcaggggtgaggtcccaggaggtgggtgggggtgggcagcagtgccaggggggacaccctcaggcctctgctggggccaggcctgcatgtgccaccgtatgcgacccgctgcccccaggacgggtgccccgactgtgatgctgcaagacccagggactcaggccctgtggtgccctaggggacaagctgtgtctacaggccaaccgcaagagggcaggcgctgcctggcccggggaggaggttggcaggcagcgcccagcccggcatgcagcccacacctgtctccatggcggatctcttgtctcttccgtccatcaaaggacacccatgctgtgttccttgcttcaggtgacagcatgatctgagggtcaagcagggagaggtgtgggcccccagctgtggggaggacgcttctaggcacccacccctgagtgctcgccagaggtcgaaggttgggcagctctgaccctgccttgcggacggtgcagtgcacgtcctacaggcaccggcccagctcagcaccgccagagaccaacaatggcagaaagcccctcagacccgggccctgggcaccttgatggacagaactcgggcaccagcaagggaaggcttgcatctgagggggcacaggatggccctaggatgacgaggccgcgtctgaggctggagccagcatggcagagcggggtgctaggtcccggctttgtgttgcacggggtcaaatgactcacaaaccggaaaaggagtgtcgttggctctgaccttcagctcgacccctgcggggaccacgatgggccggaaggacagcgagtgggggcagatgggcgtgatcatgatggccggcacgttggggtggatcatggaggccccggccgcggccgcatacgccgtgctgcccgtcggggtggacacgatcactcctgacagggacaggcgcaggcgtcactcccgcccgagggacgctcagggccccaggacagtgctgcgggccttaccgtcgccctgcaccgtggtgatgaggtgtccgtccaggtagacatccacattggacaggtaggaggaggggcctctgtcaatcaccacctcattcaggacctggaggggcgacagcattgcacactcagggcgggggatgccgcacggctcgcagacaccctccgtctcacccagccgggctctccggaaggtcctcatccctgggaccgaagtcgccccaccctgggcccctcaccgaggccgaggcgcctccactcacctggtactgcatggcctgcttcccgacatccatgtccaggcctgcagcctgcgagccgttctcacccagcccattgtgcacggccgtcttcttcccccggagctccttcaccaccctgaccttcagccgactccggagaacaacagctgcgttccctgaggtccagcaggagtcagagggcatgcatcagggaagtcagtggggtcaggggccccaccccagggaggccagtgggagtcagagggctctttcttctcccaagttgacacacttctgtgcctttttctttttattttgagatggagtctcactctgtcacccaggctggaatgcagtggtgtgatcttggctcactgcaacctctgcctcccaggttcaagtgattctcctgcctcagcctcccaagtagctggaactacgggtgcgcaccaccacgcccagctaatttttgtatttttagtagagacggggtttcaccgtgttggccaggatggtctcatctcttgacctcgtgatccgcccgcctcgacctcccacagtgctgggatgacaggcgtgagccaccgcgcccggccgacacttctgtgccttctgagagtgagaatcagctcacttctgcccaacacacatggcagcttcaacctgtgatctgctgaaacttctcagtgtcagtaaaaggtttgaaccactcaagatttagaaatccctgaatcttgaaacctttaaatgttgctccatgcatcattaaatgaaaataaaccccccgcaagcaagcgagacagcagcgccatgatcagagctcctgtgggctccagaacattccaactcaccctctatcacctgagtaacttgggactgaaagttctcaaagctgaatggggtcaggaagcccagggagcccaggtggaaggccatgaccggagggacgctgccctgtgagccgacggagaggtcactcagtgcccacgccgtgcacccccgcaccacccagctttccagcagcacctcaggagggacccagctctgtggggacagcaccccgaccctctgcaggagggactggccatgtggacaagcggagggggacgtcgcaggccagggtgggccgggccaccagggccaaggttggtgtggggagctggtgaggaacaaaggtggcagggctgagcggccccctgggcacggagggctgggggagctggcgagggcgggtgggaggcagccttggggtcggagcctcgcgccccacaggtgctaatggggagatggggagaaaagcagggcgggctgcgggcatttccggtgtcaccaacatgcagtgggccaagggcagagccagggtcccccacacagcgtggccctacagccccaggggagagctgtgctgctgagaaaccaggaagaggagctcaagggaggcccagaggggatgggccagtaggcgaggtcgtttcccaggacccaccaccctgcgccactccctgctgtcccaggcgggcgctggccacccccagccgtagcactgtgtccacactgcccctggccccaccgtcgcaccccaccgggctgccaccatgggcctcagtgctggccgctctaggtgactgctctcgtataaaggggtgaaaagcaatggaagccatgcttgtgagcccctcgttacgcagcacctagactagaacctggtgtgggtctggaaatgtcagcgcttcacctggaaaagcgaggaagcgtacagcagcgtcccgtctccccccaggcagatgatgaagtctatctgattggaaatgtcatcataatctaggaaacacaaagcaaaaccaagaagaggctgtcacacagtggcccctctgtggcgcagtgcgcagacaccaatgacaagggcaacagtgccagaagcttccaatggggcggggaactgtgctggagaaaccaaggacagagctgctgacagcccaccttctcgaaaggtacagaatttcttcttcactgccccaaagctttcatcgctggcgatggcagggtcttctagcactttcttttccacatacacgatcatgttctcctggaagcaaagtgccaacctgctcattccacctgcagaccccaccctcctgcagggaggttcccgactcacgggcgctgtggtcagagacctggcatcgtggcctgcatgcccgcccccccacgctcacgctgaaacttcatcaccaacgcgccaggaggaagcaggacctttaagagatgactgggcggagggggctccctctcaggaattgactaaggctgttatttcaggagtggctttcctgggcgccgcaacccccacgcctgctcttctgaagagaagacacagcaggaaggcccacgtcagatgtggccccttgatctcggacttcccggcctccagggccacgagcccaccagctcattgttggtcacccagtctggtgcttgccatggcggcacacacaaacccagacacccggcagatccccactcagtccccagttccagacaagcagccgttgcccagcacttgaggtggttcccatggtctcacggggcggtgatgtggatggaggcccccccaactccatgtgcaccccaggcccccttcccccctgccccgcgtgcctccatgaggtgcgtgcagagctccttgaacggctgcagtaggctggcatctctcatcttcttgatgacaaggacgctctttggggacttgttccacgtcagccgctggctcgcggggtcctgaatgtgcctttaggggaggagaaaagagttcacaccagctgcgatctccctcttgcggaaaaggtgtatgacttagaaaataaaaaaaaaaatctttaaaaaggtgttttcacctcccagggaaacgtgctcggtggccacgggctcacagggcctagggtcgcgccacagagacagggtcaggggtcagtagggtccggagtgaccacctctcacctgcttggcccatcacacgcaggctcaggcccacaacccccacccgggcaccacgctgacccaagtgcacgcaccacagcccttcccagcccccggccacttgcctgcctggctcctcagtgacgctggtggggcagaaatgaccacgaaagcccatggctgggccactctttgcttgatgccctcctcaggcccccacgaaaacccaaaccagttgacatggtgactctgtccctaggatcctctgcacacagtttctggccccacgggagcccaggacccctcaaggacccgcttccccccctgcacacagctcactacctccctgcatgaacggactttaacctcactcactctcacagtaaaaatcacaggtttaaaagtccgtggcagccctgacacagccacccgcgctttgctggctctgaccccgaccactgtgcccggtgtttctccacaggcagggcccaccccggtgggattcccattaccacgttagtcacagaaaacatcccagcccagaaccgggaacacacaccacggagcctgctcctgttcccagaagccaagggagggcgcagcggggctggccaccgtcgtcagcgctcaccgcctatcctcagccccaaaggacaagttcttataccaccgcgccagccagctagttccaagttgcccaatcgagaaagctgctgcctgccatgcctcttcccagcagtgacttccccaggagtgtgaccgtcccactaacacccccagaaccacaacacagacgccgatggcagccacagggccacagaccttagcccatcgcttgtgaccttcggaagctggtcagcactcaccctgtgcaggcattactgggaggcgtggggtcactcatgccatcccctatgagctcagcacctgccgggtcacacatgtggctcgcgaggtagcccctgcctgctgggagccggccagtgtgtccacagcatccaggccacgcttggcgaacacgcggccgccccatcggtatggtcctgactgtgcgcccacactagaagcctaagctcttcatactcaaaactcaaagcaaaacacaattgtgatgagacttggtaaagttgttgtaaaagcaactaagtcaaaagagcttcctacacttataaaaatcaaacaaaacaaaacagtttcctcattggtcacatggtcctcctgcctaatcccttctgaaaaaaagtcctcagttcagcagcaaagaggccacacttcagctccctgctcctaactgagccgggtgggaccaagccctctgttcccgtggcctcagacctggccaagtacccagcctccagcctcgccccagcactgcgccagccaccgctctggcccgcggaaccggctgggccccagggaaggcaccctcaggccacagtcaggtggaagggcgttccctgcctcctagcccgctgcgtcactctgcttggctccggcccaagggcgtgcaggtggctcacggtcctccggcctggtcagccagcaaagcccccgccctgcacacggctccccctgctctccccgccaacagtcaccactgacccagtggcctggcctacacccattccagccctgaggctcagctgagcccagccagagccaccagcagcggcgtcgtacaccggcccaggcacccaccgctgtgtgtgaccacaaaccagcgcctcgacctcttcctgggtcacctgcaaagcaggacaccagcccttgcaggcacgcacggctgtgggtactgcacggagagggcagggggtggcgtgaagcttgcaggcacacacggctgtgggtactgcacggagagggcagggggtggcgtgaagccagcatggccacagcctggcccgcctggccagctcctactgagactgtctcacacatgggtggccacgcacactgtgacacacgggcactcacgcacctccacaacacaggcccaccaattccctggacaacaaaacaggaagcgggtgccctcctcaccaggcgcccccacagggtcttgctctggactatcagggaagacggaagttcagatgcatgggaagccctgcccctccacagcggggatgggaagcgggaggttatgatcccagagacacagagcccagagggggcgtgctcccatgggggtgccgagaaagctgcatgcccctcaaggctgccccacaaacccaccgcttcctcctgcggggctgtctggcctcgggcagctcggggaccactgagtacgccctggtctgagggctgaggcagaacatgcacctgtccggtgaccccgccctggcccgagtgactgacggctggtgaaggcagcagctgagatgcgagtgacaaaggagtggctctgccaggaccaggaagtgcagggagggcaccaggcagcgggggagaggcccggtggggtgccagggacacagcaagcacaggatggcgggacagagccacggcggggccgggagggcagtggagcactctgggtcacccacgtggctgctgtgcagggaagggatggtgaggccgcggcgagtggtcaggagtccacacagcggagggcagccgggcaatagtgcaggggagctgcttggatattttgggatcaaagtgacagaatctgcagatggactggatgagggaaagcaaacaggggtcgggccccccgcctcaggcatttggcagcagtgacaggtcacagacactccgggaaccagtggcactgaaagggctgggcctcaaaagcacaagtgcgagtcacttccatcctaaggggctccgtcagcgtctggagcagcaaggccaacccccgtcctgcctgggacgcacgctgccgcggggcccacactttgcagagcagctcctcggatgactcccccgtggctcctgggacctgaacttcggtgacagcccagggctggggcctccgtccctgctgtgcgcccccagcctccatggcaccggtgcctgtcagcaaagggccatgcagtggccgcccccgtatcacacggccgcattgcgctttctggtcaacagtccccagcagcctgcgcgctggaacactcggcccttccgcatggtcctcccttgcagaaagtgaagcatccatgactccgtgaaggaggaggccctgaagagagcccgttctgcacagaggaagagagcccgttctgcacagaggcctgagagctgaggcaccagtcccagaagcaaaggcttctctggggaagaggcaatgaggatgtctaccaggtgcagaatacgactctcagggctggctgggagctcacttttttctctggagacagtcttgctctgtcgcccaggcggaatgcactttgataatcacagctccctgcaatctcaacctcccaggttcaggtgatcctcccgccccagcctccttggcaactgggactacaggtgtgtgcaacgatgcctgctaatttttgtatttttctgagtctgagtcttgctctgtcgcccaggctggagtgcaatggtgcgatcttcggcttactgcaacatctgcctcccgggttcaagcagttctctgtctcagcctcccaagtagctgggattataggcacgcgccaccatgcttggctaatttttgtacttttagtagagatggggtttcaccatattggccaggctggtcttgaactcctgacctcgtgatccgccccccttggcctcccaaagtgctgggattacaggtgtgagccaccgcagctgaccaatttttgtgttttttgtagggatgggctttcaccatgttgcccgggctggtctcaaactcctgggcccaagtgatctgcctgcttcggactcccacagtgctgggactgcaggtgtgagccactgcgcccagcctggattataattctttacacataaaacacagatatcagatcgatcactgttgcgtttttcccatgacactatgacgggcctccaggcagaatgtgttgacaaactgaaccatcaaatagcaaacgcaacccaccccagaattctcactcactcttaaagaaacaaaaaggcagccctgaggatctcatgtggaagccgccacacccacgggctgtgacccggtctccaggccccggctcgcctgccgtccactttctcaaagccactggaaaagccacagctggggagcccccgctcggatgcctgcactcagggggttcagggaggacgcccatgtggctttttgtttaaatgacctaaacatgtacttctcacatgaagtgctagaatcttcctcaacacagcgatcccacaactccacacacatcccgaggactcccccatcccatggcccccggcactcacatgatggtctaggggttctctcccttccaagaaccccccgtcctggggccccagcactcacatgatggtctgggggttctgcagcacacaggcctttggtccaaaagtggtcaccgggcatggcccatgaagagagcgtgtcctcctgtggggagagggcagtgtcagagccaccagggcctgaaaccagacatgcagtgacagacacagatacagaggaggttacacggtaaggcatacatgcaatttgaaagatgccaactccatctgcccagcagccacacaatagcccttggaaggttctgcccaggtccatggctgcactggagcggcacctgtgaggagcacgcatgcccacgcgccgctcagatcatgacccaagccggggagagcttcagcccaaacaaggaaaatgccagggccagggccagcctgggatcagaattcctcagtgtctccaggacccctctctagatctgcatttgggactcaaaacctgagacaacatctcatctctaaatcgtctagattaaaattctagcacaaatgttcactctgaactcatgtcaataaaaaagacgtaggccgggcgcagtggctcacacttgtaatctcagcacttcaggaggctgaggtgggtggatcacgtgaggtcaggagtttgagaccagcctggccaacatggtgaaacccccatccttactaaaaaaagaaaaattagccaggcctggtggcgtgtgcctgcagtccgagctactcaggaggctgaggcaagagaactgcttgaacccaggaggtggtggttgcagtgagccgagatcgagccactgtactccagcctggctgaaaaaagtgaaactctgtctcaaaatgaatgaatgaatgaatgaatgaatgaatgaataaaagacgccagatgaacggctcaacaactttcctagtgatttaaacatggccaggtcacagttaaatcacccagccaggggctgtggcagccgcacgcgtcctggggagaatgctgtcaggaccgctgtgctcctcagggtccagcactgaggctgccctcgtcctaggtgcccgggagcctcccagtcccttcacaaactcagaaaacttgcacacagctggccaggcaacggcccaacaaaatcctcaagtcccaatgcagaagaacggccttccgctgcctcgcagggccagacaaccccaggagagccgtggtgccctgagggctgctccacaggtgacacaggcgtggccatcagtggtcacggacttgtttacctcagccttttaaaaattggtaagtacaggccgggtgcagtgactcacgcctgtaatcccagcactttgggaggccaaggcaggcggatcacgaggcaggagattgagaccatcctggctaacacggtgaaaccctgtctctacacaaaaatacaaaaaattagccgggcgttgtggctcacgcctgtaatcccagcactttgggaggctgaggtgggcggatcacctcaagtcaggtgttcgagaccagcctggccaacatggtgaaatcccatctctactaaaaatacaaaaattagacaggcgtggtggcatatgcctgtaatcccagctactcaggaggctgaggcaggagaatcacttgaactcgggaggcagagcttgcagtgagcctagatcacaccactgcactccagcctgggcgacagagcaagactccatctcaaaaaaaaaaaaaaaaagaagaagaaaacgaagtacattacaaaagaattttacttacttacgaactgaaaagattattgcggaaaacaatgtttctcgaagtgggtgttgggatttaatgtttccttcccaaggacaggctatgcttgggcgtatttggctacctcctcccccacctcaccctgaaggcgcctgtcactcactatggaggcgacctctgacccagggctgctgtcatcaggttcagaatgcaacagaaatggtgcattatgccaaagaacccacaggaaaaaaaaataaaaccccaaagcaattctgttcacgcagtcactgcgctggggtggcctggaggtacaggacaacgacccccactgacaacgaggcaacgaggcatctgagaaaggctgagtggtgacgtggtgcctgcgggatgaaggcagccaccagcgctcgtagcctcctggctcaggcagcgactctgtagacagaaaacgtgggagtagcctgtttctccacggctgccaccacgtcagaggcgctacaggctctcccatctcactgggtaagacaacatgctttctaagactacttttcaccaaaaagccccccttgcatttgatagtcgtgatccttgttaggcagcgccggctctggcaagcttccacctaaaactcaccacatttaccatcaccagaaccgagagcaccatccccaggcaccatcacagctgtgcttgtgcggccaccgtcatgcaaagcccggggcgctgttgcccaagcagcattgtgcaagggtgagcgctgtgggcactcttggcacaggagggagccacttgcccaacatgtgagagggctgggcccgcccaaggccacgctcataactctgcctccaccagccctgctcacagtgcagaaccccccagccttcgcctctcaaaacaagcagagccaagagggatgtcccctcacaccccagtgacttctgtagagcaaatgtttccaggccaggcacagtggcttgcaccggtaatcccagcactttgggaggctgagacgggcagatcacctgacgtcaggggttcaagaccagcctggccaacatggtgaaaccccgtctctacaaaaatacaaaaattagccgggcatggtggtgcacgcctgtaatcccagcttcttgggaggatgaggcaggagaatcacttgaacctgggaggcggaggttgcagtgagccaagattgcgccactgcactccagcttgggggacagagcgagactcagtctcaaaaaaaagtttcctctccaagtgcgcttcagtctaacatcaagggtcagcgtaggcgccagttagatggttctgtgctgatacagacagatagagaaacacggtggcaccctgtgcctgtgctggcacctgggaacgtgcgccaggcaggtgtccatgggccaggatcccccttcaagggcacagcttcacctgggcaaggacccagcctcaccttccggatgcatcgacgcagactactcaggagaattcttcataatcgttttaagaaagaatattatgaaatcagacgagaaaaaaaagaggaaccatccctcccagttgtacctgaactccttggtgctccccagggcgggcgaggcagacaggctgcgagacttggcccggccccggatggggtggttgtaactccaggtctcatcgccgtggcaggccgagcagcagtaagcagccgcgtctggactcaattccttattcatggtcattttttcttgttccatttccattgtcaggaaatgagaacttcggtcagaaaaacactgatgccttaatttaataaaataaataatgtaaataaagtaaataaatatgtatgaaacaataataatttacacatacatatgttccatttcatcaaggggaaaaaatggctgaagtccaatttaccaaagtactttgaaaacagactgtttccattgcaaagatatttaagaactactctaggtttttggctgggtgccgtggctcacgcctgtcatcccagcactttgggaggtagaggcgggcagatcacttgaggccaggagttcgaaaccagcctcgcctgaccaatatggtgaaatcccgtctctactaaaaatacaaaaattagctgtggtgggcgcctgtagtcctagctactcggtagactgaggcaggagaatcgcttgaacccaggaggtggaggctgcagtaagtcgagatcatgccattgcactccagcctgggtgactagagtgaaacttcatctcaaaattttttctgtaaaataatattaacaaaaaaaattgtttcaaaaaagaacaaaatagaaagtcacactgtgtggccaggtgtggtggctcatgcctgtaatcccagcactttgggaggctggagagaaaggatcagttgaggccaggggttcaagaccactctgggcaacaaagaactcttctctagcaaaaaaaaaattagccgggcatggtagcccatgagcgagaccctgtcttaagaaaagaaagactctggccaggtgcggtggctcacctgaggtcgggagtttgagaccagcctgaccaacatggagaaacccccatctctattaaaattacaaaattagctgggcgtggttgcgcatgtctgtaatcccagctacttgggaggttgaggcaggagaatcgcttgaacccgggaagcggaggttgtggtgagctgagattgtgccactgcactccagcctgggcaacaagaacgaaagaaactccgtctcaaaaaaaaaaaaaaaaaaaaaaaaaaaaaaaaaaaaaaaagacaggctcttttctcgtaaacaatacaacacattaatgagagagaaagtgtgcaatttcaaataccctagtccagaaaagctgtcaaataaaattgaaccagcagatatgttgtgaactccatgccttgcatcgtgaattcagcgccaatgaaatatttaccaaactgaccaatattaagcctcaaagaaaactggtgaggatagaaaacctcacccttttttcccctttttctttttctttttttttttttgagacaggatcccacctcagccttccaagtagctgggactacaggagtacagcaccacgtccagctaattttttttcctttggtagagacagggtgtcttgctctgttgcccaggctggtcttcaattcctggcctcaagtgatcctcccaactcagcctcccaacacagtgctaggattataggcatgagccaccatgcctggcctagaacctcatctttttttttttgagacagagtctcactctgtcgcccacgctggagtgcagtggtgtgatcgcagctcactgcaacgtctgcttcccgggttcaagtgattttcctgcttcagcctccctagcagctgggactacaggcgtgcgccaccacgctcagctaatttttttgaatttttagtagagatggggtttcaccatgttggccaggctggtctccaactcttgacctcaaatgatctgcccgcctcagcatcccgaagtgctgggattacaggcgtaagccaccacgcccagcctagaacctcatcttctgaccacaatacaataaaaccaggaagagatagaaacaaagaaaagccctcagccacttggaagtttctgaactttctcttaagcaacccagggatcaaagtgaagatcagacccaacatctggaacacccagaagctggaggtgacataaacaggctgccagggtcggttcaatcccatcaaagctgggtcacagcccatgggaaaccatgaactgagcattcaagccaataaagccagaaatagaataaaacaagcttcagaagaacagaagaggggccgtgcacagaaacaataaaaatcactcaacagaggctaaacacacaaaataaagccaaacataccttctcattaaagaagataaatcttaatgaggacaaggtagattctggcattaaaaaggataaatgtgacattatggactgaatgtgtcctccccaaatttattttttatttttattttgtagagacaaggtctctctgtgttgcctaggctggtctcaaactcctgggctcaggtgatcctcctgccttggcttcccaaagtgcttggactataggtgtgagccactccacccagcaatccccccaaattcctacattgaagccctaacttccagtgtggctgaatatggaggtgggcctctaagaaaggagttaaatgggcgcggtggcacacatctgtaatcctaacactgtgggaggctgaggcgggcagatcatctgaggtcaggagctcaagaccagcctgaccaacatagtgaaactctgtccctaaaaaatacaaaaattagccgggcgtggtggcgggcgcctgtaatcctagctacttgggacgctgaggcaggagaaatgcttgaacccaggaggcagaggttgcagtgagccgagattgtgccactgcactccagcctgggccacaagagcaaaactccgtctcaaaaaaaaaaaaaaaagaaaaaatgaggtcataagtgtggggtctgatcagacagaatgagcatccttgtaagaagagacaccaggctaggcacggtggctcactcatgtaatcccagggctttgggaggctgaggtaagaggatcacttgaggccaggagttcaggaacagcctgggcaacatagcaggattctgtctctacaaaacaaaaacaaaaacaaaaccaaaacaaaaacagttggacacagtggtgcatgcctgcagtcccaggtacttggaggctccggcaagaggatcaatgagcccaggagtttgaggttttgcagtgaactgtgattgtgctgttgcactccagcctaggcaatagagaccctgtctcaaaaacaaaacagaacaccagagagctctctcctcacctctgttcccaccctcactgggcacaaaagtaaagccatgtggggacacagagaagatggccattacagtgagaaagagagtctttacgatgaaccaaattagctgggaccctgaccttggactcttggcctccagagctctgagaacaaacatttttgttgtttacccgccccctgccccatgcctgtggcactttgttacagcagcctaaataaaacaactaaaatatgtgagatgatggcaaggtgggcagaaggaaagttcaggaactatggacacaagactgtgggccctatgctacggtcaaagccaacgggttctctgaatacccaaaagctggttctctctctggctgcattctacaatcaccttaggagcttcaaacaacaccaattcctacgtgccctccagactgaatgatcagaacctgaaggtacagcccaggcaccggcactttaaaagagctccccagaagattctaatgtttagcgagaattgacagtactgtcccagtgggtcaatatctccctagcttaagacataccaggcgggatgtggtggctcacgcctgtaatcccagtgctttgggagaccaaggtgggcggatcacttcaggccaggagttcaagaccagcctggccaacatgatgaaaccctgtctcgactaaaagtacaggctgggtgcggtggttcacgccagtaatcccagcactttggaaggccgaagcgggcagatcacctgaggtcagatgtttgtgaccagcctggccaacatggcgaaaccccgtctctactaaaaatacaaaaaacaattagccgggcgtggtggtgggcgcctacactcccagctactcaggaggctgaggcaggagaatggcgtgaacccaggaggcggtgcttgcagcgagccgatatcgcgccatggcactccagcttgggcaacagagcgagactccgtctcaaaaaaaaaacaaaaaacaaaaaacaaactagccgcgtgtggtggcgcgtgcctgtaattccagctgctggagagggtgaggcatgagaattccttgaacctgggaggcagaggctgcagtgagctgagatcgtgccactgcactctaacctgggcgacagagcaagactccatctcaaatgaaaagaaaaaaaaaaaaagaaaaaagacataccagtgttttattcaaatacatgaaaaattcggccagacacggtggctcacacctgtaatcccagcattttgggaagccgaggtgggtggatcatttgaggtcaggagtttgagaccagcctgaccaacacagtgaaaccctgtctctactaaaaatacaaaaaaagggctgggagcagtggctcttgcctgtaatcccagcactcaaaacaaaaacaaaaacaaaaacaaaaacaaaaacaaaaacaaaaaaattagcctggagtggtggtgggcacctgtaactccagctatgcaggaggctgaggaaggagaacaggagaattgctggaacctatgaggtggagggtgcagtgagccgagatcgcaccactcactccagcctgggtgacagagtgagactctgcctcaataaaaagaaaaaagaaaaaaagaaaaaaaaaccatgaaaaattcaatgaaaaccagaacctacaaaaacatgtctggtataactactcctattgaggactatactagaggccacagccagtgcaataacataagaaaaaaataaaaggtacagtgacagaaaaggtttggcatgaaatgtaggtctgttaaacaaaataagaaaaggaacaagtgaagttgtacttgcagatgacatgacatttctatgtagaaaaacaaataagtgagtttattagcaaggtttcagaaggcaaattcaatacacaaaaatcgcctgtatttctatatactagcaatagacaacaggaaattgagaccatcctggctaacatggtgaaactctgtctctactaaaaatacaaaaaattagccgggcatggtggcgggtgcctgtagtcccagctactcaagaggctgaggcaggagaatggtgtgaacccaggaggcagagcttgcagtgagcggagatcgcaccactgcaccccagcctgggtgacagagagagactctgtctcaaaataataataataataacaacaatataatttacagctgggtgtggtggctcacgcctgtaatcccaacactgggaggccgaggtgggtggggatcacctgaggtcaggagtttgtgactagcctgaccaacatggtgaaaccctgtctctactaaatataaaaaattaggcaggcatggtagcacatgcctgtaatcccagctatttgggaggctgaggcaggagaatcacttgaacctgagaggtggaggttgcagtaagccgagattgcactgcagccttggtaacaagagtgagatttcatcttataaaaaaaaaaaaaatatatatatatatatatatacacacacacacacatatattattaaaaatatatatcttattaaaatatatatacatatatatgatctataatagcattaaaaatataaaatatgtggggatatatttggcaaaagacatgtcagaactgcacactgaaaactacaaaatattgctgacagagatgaaaggaaacctaaataaatggagagacataccatgttcatggattggaggactcaatattgagatcttagttctcatcaaattgatctgcaaatgttacccaaacacaaccatcaaaagccaagcaggcttctctaaaggaaaggacaagctgataaaattcacatgaaaatgtaaagtatctagaccagctgaaaaaactttgaacaagaacaaacgcgaagggctaagttcatgacttgttgaaaaactacgggaaccagacagcgtggcagcatcaagacggacatacacatcaaggaaacaggacggccagcccaaaggtagacgccacagaccctcacacacatgcagtccatgaatttttgacaggtgctgaggtgattcaacatgaggaggatcatcttttcacctaatagttctgaacaactggacagccacgtctaaaagaacgaagcccaaccacttcctcatactacatacaaatattaactcagaatggattatagacctaaatgtgaggactaaaactatgaaactttttagaagaaagcactggaaatttttttttttttgtctttttgtgagacaggatctcccactgttgcccaggctggagtacagtggtgtgatctcagctcactgcagcctcaaccttccaggctcaagcaatcctcccacttcagcctcccaagtagctgggattacaggcatgcaccaccacacctggaaatttttttttttttttggtggagatggggtctccctatgttgcacaggctggtttcaaactcctggtctcaagtgatcctcccaccttggccttccaaagtgttgggattacaggcgtgagccacctcacccagctggaaaaagtcttagtggtgtttaaaatcttttatacttaatggaaccctgaattttttttttttttcctgttttaggcagggtcttactctgtccccaggctggagtacagtgatgtaatcatggttcactgtagcctctacctactgtgctcagacaatcttcccacctcagcctcctgagtaccagggactacaagcatgcaccaccatgcctgactaatttttgtatttttttgtagagatgaggttttgccatgttgcccaggctgacctcgaactcctgggctcaagcaatctctctgcctcagcatcataatgtgcttggattacaggcatgagccactgtgcctagccaaaacactgttaagaaaattaaaatacagttgggtgtggtggcttgtgcctgtaatcccagcactttgggaggccgaggcgggaggatcgcttgagtccaggagttcaagaccagttctgtgtcttgctagtggttatataattaatttaagaggtaacactgcatagagccatacacacatgtaaaactggtgaaacctgaataaggtctatagtttagttagcagtatttcaattccctggttttgatattgtactatggaggtgtatggaggtgtaagatgttaacacaagggccgggcatggtggctcatgcctgtaatcccagcactttcggaggccaaggcgggcggatcacctgaggtcaggagtttgagaccagcctgaccaacatgcagaaaccgcgtttctactaaaaatacaaaaaatcagcccggcgtggtggcgcatgcctgtaatcccagccactcgggaggctgaggcaggagaatcacttgaacctgggagggggaggttgcggtgagctgagatcacgccattgcactccagcctgggcaacaagagccaaactccatctcaaaaaaaaaaaaaaaaagatgttaacacagagggagctggtgaagggcacaggggtctctctgtactatttttacaacttcctatgaattagtctatgattattttttttttccccagacgaagtctcgctcttgtcccccatgttggagtgcaatggcgcaatcttggctcactgcaacatctgcctccagggttcaagcaattctcctgcctcagcctcctgagtagctgggattacaggtgcccgccgccacacccggctaatttttgtattttaagtagagatggggtttcaccatgttgaccaggttggtcctcaaactcctgacctcaggtgatccgcccgcctcggcctcccaaagtgctgggattacaggtgtgagccaccgcacccagccaattatttcaaaataaacagttaataaaggtcagacacagtggctcacacttgtaatcccagcactttgggaggccgaagcaggggaatcacctgaagccaggaattggagaccagcctgggcaacacagcaagaccccgtctctacaaaaacattaataaaaaataaacaaatcaaaatcacaaaatgttaaaaaaaatgtattattactgctacattacctagaagctctattttgtgtgtgtgtgtgtgtgtgtgtgtgtgtgtgtgtgtgtgtgtgtgtgtgtgtgagagagagagagaaatagagatattgagagactgagaggtagggtcttgctctgtcacctaagctggagtgcagtggtgcaattacagcttactgcagcctcaatctcccaggcttaagggatcctcccatgtagctgagactacaggcatgagccactatgtccagctaatttttaaattttttgtagagacagggtctcgctaccttgaacgggctgaccttgaactcctgggctctggtggccctcctgtgttgacctcccaaagcattgggattacaggcatgagccactgcacccagcctagaagctctgttcatatttatttgcgaagatcaatttgatgactaagcagtaaactaatttataaaataatattaaatattaaaaccaactttaaacaattatcttcacctatgtatgtgtgtgtgtgtatatatatacacacacacacacacatatatatatatttaacaagtatctccaataccacaaccagtgtattttttgtttttttgagatggagcttcgctgatgttgtccaggctggagtgcagtggcgcgatctcggctcaccgcaaactctgcctcccaggttcaagcaattctcctgcctcagcttcccaagtagctgggactacaggtgtgcgccaccacgcccagctaattttgtatttttagtggagacctgcctcttaattctccaacatggaggggtttctccatgttggtcaggctggtctcaaactctcaacctcagatgatccgcccgccttggcctcccaaagtgctgggattgcaggcgtcgccaccgcgcacggccaccattatgcctcggcctcccacagtgctgggattacgggcgtggccactgcgcgcggccaccattgtgcctcggcctcccacagtgctgggattgcaggcgtggccaccgtgcgcggtcaccactgtattttttgacaagggtgagtcaggactgacacttaattcatttgtttgatatattaactgctttaaaaggacacacaatgctagctgcaccaaagtgcattcaaattcctcatagcatgaatctaattttaaaaaacctttgtagggcgggcatggtggctcacgactgtaatcccagcattttgggaggccgaggcgggcagatcacgacatcaggagttcaacaccagcctggccaagatggtgaaactccgtctctactaaaaatacaaaaaaaattagctgggcgcggtggcaggcgcctgtcatcccagctactcaggaggccgaggcaggagaatcgcttgaacccaggcggcagaggttgcagtgagctgagatcacgccactgccctccagcctgggggacagagtgagactccgcctcaaagaaaaaaaaaaaatcctctgtattaggaagttttattagaaaaaaatactagagcacaataagaaaatattcataacgaacttatacaaagtagcaaggaaaacattaagatgccaataaataaatgtgcaaagaacatgaacaaaagtcacacacacacaaatacaaacataatacacgagttcgttcccatgtaagaactcaatcaatatttgttgcaagactaaatgaaaaaggaaaatttatttagtgacagaaatggggaaacattcaacctcaaccctgagtgggaaaaaacttactgcccactaaattacccatctcatctcaccccggtaaataatgcccagtgctggcatgcacactggcagtatacaaactgagaaagactttctggaaagtgctacagccatgtgaccacagggcttcaccctgtgacctcattaaacctaagcagattacaggtctgaagggggctttctttagatgtggctccacctacttaggggcagatgaagaaaacaggggtctgggcagttctgaatgggaaggccaggcatcacctccctcttcagttgcacaaagtgtgcgtggcatcctcacatcccatctgcctcaatttcgctttttctctgaacacttttcaccatctgtctgaagcacacacacacattttattcacttccccattcccatgcatgaatgctaggacctttgcaattgtgggccaggaaagattgcaaatgataagccaccagcacagagagtagaaatgaaatcctggggttacaagctaaagcattactgacacccacttgtccagaacggctgaagctgggcggtgactgtcaacaggtatatacggactagaaagtggagctgctggaggaggccctgtaccttcctgccatgacacagcctccccccaagtgctgggcttgtgtgctcaacactccctcttgctgtcatcctaccacacctgcagactggaggtaatccagatgcaaggccgtcgagtcccgcaaacacccacctgcctcttaattttccaagtgagacctacatttcctcaagcgtgaagctcaataaaatcaactattgttttccgttttcatcacgagcgccactttccccctatttgttcaccgcctccactccacaagaactgctcttgacttggccaactttctgggacaccctcactacaaggatttatgagtcaaacaggtttttgtgctagcctggaaatctaactgctgacagcagttgtttcaagaagaaaatgctgttttggaaccaaacagcaggctgccaactgaaacaacataaacccacctccaagttcaaatgaaacaaacaaacaaaaagactggtccaagtgaggcaagctgtggtggctcacacctgtaatcccagcactttgggaggccaaggtgggctgatcacgaggtcaggagttcgagacaagcctggccaacacagtgaaacccgtctctactaaaaatacaaaaattagctgagcgtggtggtgggcgcctgtaatcccagctactcaggaggctgaggcaggaaaatcacttgaacccgggaggtggaggttgcagtgagccgagattgtgccactgcactccagcctgggcaacagagctagactctgtcttaaaaaaaaaaaaaaaaaaaaaagactggtcaaagtggcttacgtctgtaagatcagcactttgggaagtggaggcaggaggatctcttgaggccaggaggttgagactagcctggacaacacagtgagactctatctctacaaaaaattttataaatcagctaggtgtggtggtgcaggcctgtaatcccagctactcaggaggctgaggtgggaggatcaattgagcccaggaatttgaggttacagtgagctataatcatgccaccataaacacgcctggaggacagagtgaggccctgtttctaacatacacacacatatacacacagaaacatctcgagaggacacctccaaatgatgaagctattttgttgggtactgcggtggcacctgtgattcctcaagtagcttggaatcagcgtgctaacaccataaagtggctgcaaaagtcccagtgaagtcactgctgagagcaaacaggccttacagagaagttccaaggggacaggaaatttccagaggcttgagaggacaatgttcaggggaataagtacttgaagggaattatctaacaaggtgttaaagtaactagcttcttagacaagatgacatcaggaggaaaaaaaaacttattaaggcaaacatgtcagtttcaggccaactaaggctgtcagagagacatggaacacaagaagagaagagttttgaaatgtattcccatcaagagccaagaataatgaacttttgaatgtaaaacttagtgtgttccaaaacaagaaaggaaaaataacttgttactcggaatcgaagccaaaaggaatctcattgcttggggaggagggatgggagggtgggggtggtccttggcctgggaaggaaaactccaccaggccttcggagctgggcacgccctgttcccacaattaagaaaaaaaacgacgacctagagctcaaggccggtgctgacatctgacctactggatggcagccgcctgtaggaacatcaccatagactattggaattttctggcaagtactgggcactaaatcagagatgtgtttttagagaattccatgccaatactgctgtatagaatcttttattcatactttcccactaggtttgggcccctctaagctttcacgagtcaaagacccctcctgcttgctgaaaccacccacggaaggccggacaccgaggacctggccgcccaagcagaggcgactgacaagcgcggtccgggctggacggccccaccttccccgcccgggagagccaggccggacagcggcctccctcagacccgtccccaaggccgagcctcgccctgggccgtgctggtgccccattcgggacggagcggtggcccgtcagcacttccacggcctcctcagcaggccagatgggcagggccggcctggtgtctccccgcctggccgcgcgctcgcgggcagcgatgaccccaggcagcgggcgaccccaggcggacggcaggccgggtctgctcactcaccgttcgctgccgcgggcgcctgcgggggcgtctacatgccggaccgagcccgcaggccccgccgccgcgccgccgccagccgtcgctacctggcccttggcgccctggccgcctgttgccccatggccgcccggaccccggcgccggcgccgccgagcagcaatgcgccgcgcccgcccactgcgcaggcgcacccgccacgcatgcgcgctgccgcgcacgtggggcgtcccgcgcgtctgccgggtcccaccggcgccgggacaccccgcgcgggcgggaggcggcgggcgtggcgggaaagaggcgggcggtggggaagaggggcgaatcgcggtggagagcagtgaccagggagtggaggcgggcagcggggacaggggcgggcgtccgcgactcgggtaggcgggggtcggcgccccgaggagggcggcccccggctcccgtccccactcacctgccgcgtccggagggcgcccccgggtccgcccgccacgtctacgcctaggcgcccccgacattgtgatcccagcccggcgtcccgcccccaactcaccgccaccgcgggcgggacctcccggaccacgtgggccggctcaggggagtgcaggtgccccgcgagagctggccccgcccgccgccgcttccctaattaccgggctgtgacacggtgtgggccgagccggatttgggaaccgaaacttagagcagctgcggcagcgctgcgctccctcggggctgtccgtcggggctgggagggcggccctgcgcctgggggaaccgcgatcggcctcacgcccacctctagcggccaggtgcgccttgcacgcccacgaacgtcctcagaggtctacgcttgggatcccaaggctggcagtggagggaggacccggtggcctggggcacctctagggggaccagggagccgtgttttgcgcaccccacaggctggaggactcggggagttgggggaggaggccaaagccacaggagcggactttgtagtgtttgttggaactgcgggtcccacccagcccgcacttgctgaactggtggctgctcatcagcgccttcaggcctcaaatatcccaataatgtgccctatacccagttctcagctctcgagtcactgtcaggtaaactggcaatgcacgaccagctgctctaacctgctggtcccccaggtgccagacattgttttgtttttctgagatagtgtctcattcgtcccccaggccggagtccagtggcgggctcacggctcactgcagccttgacctctcaggtgcaagcgatccttccacttcagcttccctagtagttgggactacaagtaggtcccgccacactcgactacttcattcatatatatatatatttgtgtgtgtgtgtgtgtgtgtgtgtagagatgaggttttaccattttgcccaggctgggtctcaaacttcacccgcctcggcctcccaaagtactaggattataggcgtaagccactgcacctggcccagccattgttttctgaggttcagtccctgtctatactttctgtgtgatcacctggcccagggtcggtgtggacctgagtcctctgcagcccttccccacacccgcatacctgctctctggtcaggactcctgggacttgaatccagagacacggaacacggcctggccaagtcttcctgaaaaacacagctcttcagttcaggaccacagtgaagtacagggcaccaagggtgactggaaagggaagcaaggatcatgagaacttgggggatttcttaagctctgtaacttctcccggggttattttgcaaacccaactgtttcaaagtgaccaccagccacacccacagaagcggccttgagctgcccagttctttttctttggcggggggagagggggcggataagatcattaacataataatgcgtgagctgagtttttgcatatgatcattagcataataatgcttgatctagatggcgcacccacaagccaggcactgagccaggcctcagtagaatcttctagagtggaggcagtcaactgcttctgcagaggcaaccagtgactgtcgtgggccccaggtcacacagcaggtgcccttcgcgtgtcccgctgtgtagggagctccagcagctgccccgtctgtggcatgaaaaccctttgtctaccctgggcctgggcactgcctgcaggagagcttccctgtttcagagatgagaaaacaaaaccagggctgtggtttccttcagctgacaggttgtgcaatttctcagggcaggccccggatatgaccttgaagattcaggggccaagatctcacacccacacctcaccccaggcctggccagcaataactaagaccaaagctgggaaggctccttagggcacccagaatggtccaagaggcagctttgcttgggctgagaccaaagggaagagatgttcccgcagcaggaacagaagggtccagggctatcatgggggcttctgccagatggtgcacaggaagaggctctgccttcaagggattgggggtcaggaaaggccccctcctgcctgaccaggccccagggatggggcagcagtgggtggcatcccctgccctgaccttcctcagccccagggctgccattgctcaaggtggcagtggactcttcacataatttcgcattgttttttgtattctttaaggatggctcccatgttgtttacttcagaacccccaaaacctggacccatcctcttctgggggtcagcagggatggggagggtggagggagaagggggaacggaggccatgagggatggagcaggatggggtgcactggggtacaggttgctcctggggaggctgaggagagagggaagttggcttcaggtggcctggctccagtaaactgggtgaacgaagtctgcccagaacccacaagggtaagtggcctggagcctggggaaaggatgactgggaaggactgaggctcccagtgaaggacatcagtatggcaggctatctggtcatctcatccagcctccagccagcacccggcacaggccctgcccaggctgaaagccaggataggggcgtctgcaggggccagtgtctggatctgctcacatgacagtcttctgtttggcctggtttggggcgaggggcaacctctttcccaggatgccagccatgtgcagggcatactgaggattcaacagtggaaaccaaagtccatcaggtgttcaccttctagtggggcagacgggcaagaagcagaattggtgggggcaggcaggggttggggtacagttttgaccaaggtacccagggacaagtgtttctctctcaggcagaggcagcagcaaggaccaggaccctgaagtggtgagagcctagagtgggcggggatcatcaacagtaaccacctggcaggactgggactccctgtgtcctcacaagatccttaccaagcagcctagtataagacgaagtctcgctctgtagctcaggctggagtgtagtggcatgatctcagctcactgcaagctccgcctcccgggttcaagccattctcctgcctcagcctccagagctggagttacaggcgcacaccactgaacccggctcattttttgtatttttagcagagacggggtttcatcatgttggccaggctggtcttgaactcctgatctcaggtaatccatccacctcggcctcccaaagtgctgggattacaggcgtgagccacagcgcccggccacagcctggtacgtttattgtccacatttttcacgcgggggccagaggcacagagaggccaagtaacttgctcaaggtcacccagcgaggaaagggagctggggggtgggggtaggggacagggcgaggccagagagtagtgggaggggccgaggcggcctttcccgggagcgctcggttcccggccggcccttctattggccccagtcactcaggctcccaggtccggctcgggggggagcggggggccgcgccaggccgctgaagtgtccccgtttcgcgtgggcagagcgcgcctccccacgcatcctgctgagggccagcctctgctaggtgcgtgacacggaggggacagaacggaaaccttgtcctgctcaagtgtggacgtgcgtgccacgtgctagagtaaaattgaggtggggaacctccatccctgggacatggagcacaggggcgaccccgcgccgcttggtcaaaggaggtccgaggccctgcaggaacagcccacagccggagcgagctgcaggtcactccactgcctgtgtccacctgcgacaggtgcgcccgcgcaagcggggcggagccaggtgacccggacacaggaagcgcgccaggggcccccacaccgcggagctgctggcgacaaagggcgctgctcctgcataggccaggctaatgcaatctacaaactagatttctgtgcctacagtttgaaaatgattgcagttcactcagccagtgtggaattatcctcctctttccacactgccttagtcagtgccgctgtccaagtgcacgttgttggcgcccgttttcatttcctgttttgctaagaaagtggggcagtggcctccatgcccgccaagggacaggcaggccgccccagggaggggtccccctcagctctggctcttccaggccaaagccaaggggaaggggcaccagagggtcccaggtcccacatgccagctccctcagtctgcggggtgccaggctaggacacagaagccaacaggaatccccaaagggaggaagtggagtcgggggtgtggcagccgtgctgagatgctcggcctttatttactctgggcagggaccaagataggccactgcaggccggcaccctgcctcccggctgctggagcccctccctcccaggaactgccagccaggaaagagcctcaggtactctctgcatttaatttttaattttttttttcttttgacgcctccaagacaagttcaactctctagtgattttaagtggggtttttgtaagacagctggcagggttagggcttgtgaagaacttgcatgtctatgaagaactgatttatttcagggaaaagtgggggatgacgaagccaggcgagcccaccccgttcagcctgccaatcacacccacttcagcagcctaaaacagcaccaggtcaccccaccagggagacaacgccatagtgtcacttgcagtgctggcagatgggcacccttggtggcgtcagaaacacacccagcaccttgcctggagcagggcggctgggccctgctccgtgaatcccaagtgccctatgggagcctctccggccagggactgccagcctagaggaggggctgctgggttctctggtgcccaggggaggagggggcctacaggtactttctgctgagagccttcttcacttactaggaaaaagtttggctgggtgcggtggctcggcctgtaatcccagcactttgggaggctgaggagggcggatgacaaggtcaggagatggagaccatcctggctaagatggtgaaaccccgtctctactaaaaatacaaaaattagccgggtgtggtggtgggcacctgtagacccagctactcggaaggttgagccaggagaatggcgtgaacccaggaggcagagcttgcagtgagccgagatcgcgccactgcactccagcctgggcaagagcgagactccatctcaaaaaacaacaacaaattagccgggcatctgggccaggcgcggtggctcacacctgtaaccccagcactttgggaggctgatgtgggtggatcacaaggtcaggagatcgagaccatcctggcaaacatggtgaaaccctgtctctactaaaaatacaaaaaattagctgggcatggtagcaggcgcctgtaatcccagctacttaggaggctgaggcaggagaatcgcttgaacctgggaggtggaggttgcagtgagctgagatcgcaccattgcactccagcctgggcaaaaaagagcgaaactccgtctcaaaaaaaaaaaaaaaaaaaaattagcggggcgtcgtggtacgtgcctgtaatcccagctacttgggaggctgaggcaggagaatcacttgaacccagaaggcagaagttgcagtgagctgagatagcgccactgcactccagcctgggccacagagcgagactccacatcaagggagaaaaaaaaaaaaagttccagctgctggagccatgggaattaaaaaattactttttttttttttttgagaggcagtcttgctctctcacccaggctggagtgcagtggtgcgatcttggctcactgcaaactccgccttcccgggttcatgccattctcctgcctcagcctccagagtagctgtgattacaggcgtgtgccaccatgcccagctaattttgtattgcctatttaagattttaaaaaatcaccagtttggaaagcagggaagtggatggttctggagcctaggagcggctatttgggacacacacagccatggttttccacactaccatggccagtgctcatttttttcttactagatgcagttctttatattcagaccaagaggaacactcagttcagtcccaaggaaagctagtctctggagtaacatcctcagacattctaagggagggaaatggcagaggagaaaggcaaggcagccgcctgtggagactcccacggtgctgtgggcaaggcctatgcctggggaggggtctgggcgatggcaggtggacctccctgctctgctggcctgtgaggtggagcttcccaggaacccctccgaggagccaatgcgccactcatggattctgtgacgtggtggcggccatggcaccgcctggcatgagcaggcccgtcagacctcacagcaacagggacagcttagggaagcgggcgcgttgcaaactggaagtggacccgtaaataatcaccacaccaaagtccctcatgtcaaactgctttattacatcttaaataacagtacagtttaatatagtatctatcttgcatccagcttccttgcagtacactgactttaaaattaaatacaaaaggtggaaaggggtaagggtgcagagagctctacagagttgttggacggaaagagaaagaaggggtttcatttgtattctctttgccagatccaggcctaccgcaaggtcacagcacagttttgtatagaatgttgcagaaaacaggatggagaagccactactgctgctatgaaggagtgcggggggcggggcggggggtcccacagaacctgctttccaaacgctgctgctgaacactggccttgaaatgaacaccaggacaatctgtgtgtgatgggaatgagccacctcagatgtggagggccctgaagaatccatataggagggcaggctcttcactccctctccctccctctctctccctccccaccctcagaatccaacagcagtcgtttgcaacagaacttttttttttttaaagaaataaagaaaacagtgacttatcccgctacccaagcgtgtagagccgcgcgctgtactgcttccgatatgtgccacagagcagcaacgagaagtggacagagccgcaatggttacaactgtaagaggttatttcttaaaagaaaaagaacacctaaggactgagtcccatatgcacttttgagcatttctacagcatgcgattctaagagtaaacccacccaatatggcaaacaatcaaaatttttaaaatttaacttagaaagtctgagatcattattttcaaaacattgatttgtacattgtttcatacacaaataattgactgactatccaagcacaggacaggcatctctcttgaaaacagaggttcctcctagttgggggtggggtagtgttaggctattataaacttccctccaacttcacaaggaaacccaaagtgagattaaaaactcaactgagaagatagacaggatgggtcaggaggaacatggtgctggatctgagctcacttttcagcaaaggtgaaggattctctgatcacgcatttgagaccgtccccgcatgtgcttggccccatggcttctgaacatgttcttttctatgccacgtttgtgtgcaacaatgatctgtgacatcagacagaaaattaaaaaccagggactgaatttacatcattgacaacatcagagaggctgccctagactctctggttttgattaactgttgaacacaaaggaatacattttaaaaaggaaatatgaatgcttccaaaatcttgctacaaacatgactgaaatttggacacgatgaccagatgaacaaagccctcagcatgttttgcatgaatgccacaaaacagggtcactggtctaaaattcaaatacactggtggaaaagtgtgtctgtctgacaattacactcaagtttaccttctggttaacatttttattatatatttccttttaaaattcattcaagacaaaaaagaaaacaaagacgatggccccggaaggaatgcacaatttgttttagtttacagcacagagatctttctctcaatgggaattgtgctcttggtttcagcaataagtgaaggaaaaaagatcttgcccttttgaagttctgaggggaggtgtagggtgtccacgttagtacggttggataggatatgctctcatggtaacgcgtccaagttggaatggtcttccagtctccatggcatccacatgctgttttaaacagagtttaaagaaatgtgaaaagaggcagagaatctaagtgcagacgcacagccaggtcactgctcttcccatcactgcatgagtgtctgcagctgagggcacgtgacttcagctttctgtaaacgtttcccacaacacaattccaaatcaatgctacatcaacatttatctagaaaccgttaatgacaacttcaaatgttctatgagaaacacgcacagttctcctcagagaagggcatttgggctgctgcattacctactggcgttagttccagatcttgaggaagctatcccaggaccctgtcgccacagccatgccatcgtcagtcacgcccaggcagctgacgcggttgtcatgcccagccaagacacctgggagcaaacaacagcagaatcacaccaaagcccagaggcatcgatctcacctgtgtgccatgttgtgacgaggacggatggtgcatctctcatgggacaagacccagagtctcccacggccaggaagggagggaaagttgcatccacgtggggaattaacctgcagcatatggccagccttgttaaaattcaaagacacgcacacacacgcaatcgataaatccagagcccctggcattgacttctcagcactcacttataaaacttaaaaaaagaagcaaaggccactatcaaaaaaatcaaaactatcatcagacgcagtggcttaggcctgtaatcccagcacgttggaaggccgaggcaggcagatcatgaggtcaggactttgagaccagcctggccaatatggtgaaaccccatttctactaaaaatacaaaaaccagcagggcgtggtggtgcgggccgtagtcccagctactcaggaggctagggtaggagaatcattggaacccaggaggtggagcttgcagtgagccaagatcgtgccagtgctctccagcctgggcgacagagcgagactccatctcaaaaaaaaaaaaaaaaaatcaaaaccgccccaatctcaaagcaatctgtaacacaggagcttagaggcatgagccgtttttcctttgtctgtgatccctagagcccagcacaaggcacagaacacaggagtagcgatggtggctgagaccactggcactgcactgtcactgtcatgtgatgagggggccttctgtcaacactcccaataaccttggcttggatcatcaccagccagaagctccacttcctcccagggggatccgaaggcccatttcagccaccctcctccacctcctgcagccaccacacagctgagtacaggggccggcgtgtgctctgccaaggcctgggctggcttccaccgcccttcaacagcactgtgactgtgagacttggctggaaatggctccactctggtccccccaggctggggagaaaaagaaatgtgtttaaccaggaggtgggagtggcacccatccggaagcaggaagccccggtaagggccaagacctggagccatgctcccttctgtcctcccaggtactgagacaaatgaatctaagtctgtaagtgtcaacagttctcaaattcaaatgcccaaatgaccatttttagtaaggaagtctcatcttttgtacacctggcaataacacgcttgcctttgatatgttaactgtaacggcacccagaggtgtccctgcatggaactcctccccctgaagcagagttcagaggggaaagcacggggctgggccctggagcctgcacagctgaccctctcctgcccactgactctccccagagccctccccgacgcatgtgggaagatctgctggtactcctcggagtccacttgcctggagggtcagagctgggccatcagtttgcgactgtcactcctgctacgccatgccacagtcccaccgatactaaaacactgcagcttatgcaaccactctgtgtttgctctaaagataccacgtaaatgtccacaagacacagaaaggccccatggccacgtacctgcccggtcggctttgagtgcatcccagacgttgcagttgaagtcgtcgtacccagcaaggaggaggcgcccgctcttggagaaggagacagaggtgatcccgcagatgatgttgtcatgggagtaagtcatgagctcctggtcagcacgaaggtcaaacagcctgcaggtggcgtcgtctgagccagtggcaaatgcattgccatttggaaagaactggaaagagaaagcaaatcaagacatcatgtaaacgctcagaaagaaacattgggaatatggattgctcaatggtagggctgcagagaacacagcaggcaaagaccagcaagactgtgctctggtaagaacagagggctgggccgggtgcggtggctcatgcctgtaatcccagcactttgggaggctgacgcgggtggatcacctgagatggggagtttgagaccagcctgaccaacatagagaaaccccatctatactaaaaatacaaaattagctgggcgtggcggcgtgcgcctgtaatcccagctactcaagaggctgaagcaggagaactgcttgaaaccgggaggcggcggaggctgcggtgagccaagattgcaccattgcaccccagcctgggcaacaagagcaaaactccgtctcaaaaaaaaaaaaaaaagggtggggggatgggggaggaactacaggggactgggatgggaggggatttgcactggggaggcacacaaacactgtgatcttggacactgtgattactgtccccaaagagtagaatttattccaaaggatagtgagaaagtagtcatcactgacaggtgtgcatgttgctgtagctgccagccatcagggctaatctcatggaggaaggagggaagcgggctgaccaaggctgtggtcaggactgcagcagagctctgtccaaccaacagatacatccttctaagtctcctcacaaggccaggggctggaaacactgcctagccatccgcgtgctaaagaggagggcaggttccctggttagctgtgcccctgaccagtaaggctctgtaaccactggtggcctgagttatcttactgtctttcccctccaggatcccaaccactgctcagctgtagaggtgggaacggggactggcatacaacaccctgtgagtatctgtgagacaagtggtcaacacagagaagtttcccatcgggagttttctgtatccccatctgtacatgaggttgtataaggatcagaaaggagaacatctaatccagaaaagtttaaaatttagcaatctgaacggctagcagagacggcagaggacccgaccccacacctccacccagactcacgcaaatggcattgatgtcagactcgtggccagtgaaggtctgccggcacatgccttctcgcacatcccagagtttggctgaagcatcacaagcaccagagacgaacagtctggtgtcaggagcaagagaaaggctcatgacatctccagtgtgtccggtaaacgtggtcgtctgctggccggtctcgatgtcccacagggcactggagcaggagcgaatgacaaggggacatcagccttaacttcttgggtggctagtcatgtgacagacaatctgtccttcaaaccacccagggccacagtgagcctctgcactgttactttaaaaacgtaaattgtttaaagacaaatttaaatgtaatacaactttggaagggaaacaaagcaaagcaagcaaaattatacagagatgagcacagggcctgggcttcagaatgacgggatcgctacctcaactcaaatgccagcaaacagggagctgggggcacttttcaagcagcaccactgaggctgtgccccctctttggtcatggatgggcatggaaggggtggcaggaagctacgtggaggccctggatggcggaggggacgcgactctatctgtggctgctccctctgtgccctcccttggcctcccctccacagggtctcagaaaaggcaggcaggagaaggccaatgccaggtaaacaaatggctcacagcaattctgaggtcctcctgccctttcctggaatcacaaacaggagagcagctgagttctcagtgatcacacctggtattttttttttttttttgagaccgaatttcactcttgttgcccaggctggagtgcaatggcgcgatcttggctcaccacaacctccgcctcccgagttcaagcgattctcctgcctcagcctctccagtagctgggattacaggcatgcgccaccatgcccggctaattttgtttgtatttttagtagagacggggtttctccatattggtcagactggtctcgaactcctgacctcaggtgatccgcccgcctcggcctcccaaagtgctgggattacaggcatgagccaccgcgcccggccatacctggtattctatcacatttctgcttaacaagctgtcaaaaggtgagacgctgacagagccctgcacagagcagaagcctggctcaggtgtaaggacagctgtgagggccacacgcccaccaacatactattctcctgtgcctcgacccatggaaggcaacaccagagagcactgtccgttcatgtcagcctcagaggaaagcctggctgggcctggcaatgcaaatccaatcagccaatctcaacagacactgcacagggagcctcctctctagggcctgagggactgactgcagaagggaagcaagatacgtaaaagagtctgaaaaaaatgattaatgaacagaagcactttaaaaatatcttctaataaataaagtcttctcaagattgacaatctaggtgacaaatcttttgtaaatctatgaaatttatacaacgaggacaccttataataccacagatgctttgctgacaagttggttaagggcccatgtctcggtgaaccccaccaactgcgtgactaggggtctgtgccctgggctgggcacagctcctgccaccaaatcatgcctcagaagaccagaaaaacccacatggccagctgaagtctaaaatgactctcataaaataactatctggacatttaatttagtactttgatgccacaaatgaaaaaattctagcatttaagtgggcttccgtttacctgtaaggtgaaaacactaaaaatgaagtctgatggaatcacttgaattgtgacgtctgttatttttagtctgtgctcattgttcacaatgacatgatgctatcagaaagggacaatcaaaacccaccctactcccacctatcatcacctaaggaggtacaaatatatagaggggaaaaaaaagaagagcaggtactttgagcctgattgtagttaaaatatctatgttggccaggcatgggggctcacacctgtaatcccagcactttcagaggctgacgcaggcagatcacgaggtcaacggataagagaccatcctggccaacgtggtgaaatcccgtctctactgaaaatacaaaaattagctgggtgtggtggcgcacacctgtagttcccagctactcgggaggctgagaggggagaattgcttgaatctgggaggcagaggttgcaatgagccgagatcacgccactccactctagcctggagacagagagagactctatctcaaaaaaaaaaaaaaaaagaaaaaaatgtgtattttagttctcagctgctgaaaattaaactttgtaaatttattagaagtataatgaggctaggcacggaggctcacgcctgtaatcccagcactttgggaggccgaggtgggcaggtcacctgaggtcaggagttcaggaccagcctggccaatgtggtgaaacctggtctctactaaaaatacaaaaattagtcaggcgtggtggcgggcacctgtaatcccagctattcaggaggatgaggcaggagaatcatttaaacccggcaggcagatgtcgcagagccaagattgagccattgtactccagcctgggtgacaagaacaaaactccatctcaaaaaaaaaaaaagtataatgaattcacacattgctactatgtgttttaaatcttaaggccacttaaattacagatggcctaatattatgtcaagaaccttatttcctccatgttcacagaggaatgtgccaggggctgtgggttctcaaggcactgcctgccccgggtcaggtacttaccacgtggtgtctccagagctggtgacgatctgattgtcatccaggaatcggcagcaggacaggtaacctggcaaagaacaggcctaagtgatgagctgaatccagcaggccttgcacccagcctcatacatagagaaacacattggcccggtggaagctctacgtctaaggtaagaccagcaccatgctagtgaccttttattcccatctgtgcacacagcagaaggtccacacgcactgctggtgagggtgagagcctggccaggcaggacagcacgtcccacagagacccacagctccgtgatgggggcagaagcagaaaccacacccatgaaacatacacatctttcatctgctttactgtttgacccatcaaaggctggggatccctcgtctatttactcattcagggcacgctgactccagtgcccaggaagcagccttaaccagacagacacctcctgctctcctacagcccacgctcagcagggacagagaatgagaatcactgaaagaggacatcagaaagggagtgctaggggaaggaagaggacaaagtaggggcctcacaagatggaagccaggagaggagggaggacgagagtagactcagagaaggaggatccaaacagagggcccagccagggcaggaggcggcgaggccacagggtcagggtggcaagggcctgcaggtcatggaagggataacgaaggcaacaggaacgcggcatggcagcaacactgcagacacgggggtgctcgtgaatatgtgtgggtgggtttgttttcttggggacagtggctgtgacacccacatcagcgtgggcacaattctgtgtctctgagtattcccacccactcccactgggaaggaagcatcagaggcgagagcaggacacaccaagatgccccgtcctaaacaacttccaaaatgaggaaaagcaacaacaaaaaatcagtccgcaatatccacacatgatgactggtctctactaaaaatacaaaaattaagcgtggtggcgggcacctgtaatcccagctactcaggagggtgaggcaggagaatcatttgaacccggcagttcaagttgttaatgacttctgttgaccattatttcttttgtacattgatcacagttctggtatttactgtggaactaaaagcatagggtcaacaaaccagttagtgtgtgcccaggattggtgacagactggccctaatctgaagattcaggggttccagtggcactggtgattcttgggatacctgtttagatttgagtgtttactgaaaagccttccccccaactacaccccagggagtcatgcgacactgcgtgaatcagcaaacaacaaaaataaaatgcaccaaaagaagaaacccactggggttttaatgtagaaagtgtaagattacagagaaaacaaagcatttatttaacaaacattattatcactattttttgagacagagtctcgtgctgtcgccaggctggagtgcagtgatgtgatctcggctcaccgcaacctccacctcccaggtcaagcgattctcctgcctcagcctcccaagtagctgggactacaggtgcacgccaccacacacagctaatttttgtatttttagtagagatggggtttcaccatgttggtcaggatggtcttgatctcttgaccttgtgatccacccacctcggcttcccaaagtgctaggattacaggcgtgagccaccatgcctggccaacaaacattattaaactggctctgacagaagaaaaatatgcatagatgacagagctcaaaatattaactacgtgcctacgaaagtatgcgtggtcaaatacttcctggaggccacaccacagggacactagggaccacaaaggtgaacccaagtccagctcagaggaggatagccctgcatacctggcgccccctgtagtgccctgcagcttgctgtcgtgccccgcagctcactgtcatgctcccgggtctccacccgagccctcctccactggcttcctggttcacactcacccttgcttcagggaagcacccccaccccgtcagatgcccatccagaccaggccaccgagccttgtagcacttagcctgtttgaatgtgagcacagaagggcaggaaagaagagtcatggagacctcagcacagcctgcatctcacacaggggaccaggcggaggcactcccaagtttactgcatgaaagaatcatgaccttggctggacgcggtggctcatgactgtaatcccagcacttggggaggctgaggtcaggagtttgagaccagcctggccaacatggtgaaaccccgtctctactaaaaatataaaaattagccagctgtggtggtgggtgctgggtctgtaatcccagctactcgagaggctgaggcaggagaatcgcttgaacccaggaggcagaggttgcagtgagccgagttcacagcggtgcactccagcctgggcaacagagtgagactctgcctcaaaaaaacaaaaaacatgacctcataggtctcaaagatgacctctctgtcccaccctgtgcaggctgtagtgaagctacacagaatccatcagcttcttactccaagaaccagagactgaaccctaaaatcacagctctcaagcgctgataaaatgatgtggacaagcatcagctgacaggaactatgaaggacaaggggaatgaccgaatgtataagccacacatggcccctgacttacaattttgtgactttatgatggtttgaaagacacacgcatttaataggaaaaccatgctccaagtacccatacaactattctgtgttttcattttcaggagtgtccaataatttacatgagatgttcaactttttcttataagatatgtattatgttagatggttctgcccaaccagaggccactctaagtgtctgtgcatgttcaggttggggggtgaggtgtgtccagtgcggctggagagcaggatgggtggtgcaatgcccagggtgcaagcatactccatgaggcccagtctgtgaacagagaccaggtctaaccccttcttccaggaaagcctcgtagggccttctggccaagaggccacgagtggtgaagactgcagactctgaaatcagaaatacctgggctccactgtcagcatggcagctgaggaagagtgaaaattcctctaagttcttttagaagtcccagcctccccatgtaactggggaactgatgggaggagcagagctgtctgtgcacataagaagttctcagtaaatggagacagttactatttctgttattattgaatttgaacaaattccctgggtatgtgtggggggacacttcaggtgaaaacacgcccctcctcccctggtgcgggggcctgtgctgccaccctctggaagcctgcagaggggcagggaaaacagaccctgaacaaaagtgtgcacccagtgaggaggtgcaagggcacaaaggtggcaccaagtgcctcaaggagaggctgaaacgcggcctggggacctcgcagtggtctggtcatataggcagtgggtgtgaagggctgtcctgtgtctcatagggaccactggctatagggacaaggctgttaaagtccaggagagagggggtggcttgaagagaggcacggcagagagtggaagcgtaggagaaagatgggctcctgggcatgtggtgtcagcagaggtgcctcaaggatagagtgagtccagagtctagaaaggagcagatcaccaggctctgggaagagcacagcatgggtgcacacactgctctacccagcatggctgccgacccaaagacagcaaagccaagaaggacacacaagcgtggccagatgcagccctgtgaggaaacttacccaagaacgggacgatgggcttgagaaaccatccatctacaaggatggcgtttgctgcagcaatgtttataataaattgtgggaaactgtgaactgcctaaatgtctcacaataggaacaaattagtgcaccacaccatgaaactctctacagctcctgagttacagaacgacagtataatactatagttatataatactgtataatactactgcataactattgtataatactgtatttctggatggaattatagggtctcccaacataaaagatgatgattcaaagttcctttccaaaattcctttttttttttgagatggagtctcgctctgccacccaggctggagtgcagtggtgcggcctctgctcactgcaacctccgccaccccggttcagcacttctcctgcttcagcctcccaagtagctgggactacaggcacctgccaccacatccagctaatttttgtatttttagtagagatggggttttgccatgttggcaggctggtcttgcactcctaacatcaggtgatccacctgcctcagcctcccaaagtgctgggattataggcatgagccaccgcgcccagccccctttccaaaatttctacaatgaacacactttgaaaggtttagttctcctacctgcaccctggagaacatccctgttgggagcaggggcaaggagaccccacccaagggaggcgcacaggacacactgaaaggcaggcgggcaaatgccaagaagtcagccatgaccacgcccagtccctcactagtcctcctccgacaggtggtttcaggagcacctgtgccgccccaggatcggctccaaggagcaaaaacaagaccgtgctggcgagggacaggctcagcctagacctggagggaaaggtgcccagccctgcaccgaggcatgcacttggagagcagaggtgttttcttcaagttcagtaagaaggaaaatgaaagagatgaggaagtaacttgaagatgtgaaagtgaggctcagagggttgcacagaggagtgcccgggcaccatgagtgcctccatgatggtgtgaggctgtgaggcccaccagtgcagccaagatactggggctggtaacagtgagcctcaagcagacatcccagtcaccagctgccctgttgtggctcctgaagcagggtttacggggagacaacatatatccccttctgtgtccaagcttgtgaggcctgtcagaaaaaaatccgctattttcatgaatatagaaaatgttctgcttctcactatatgaagacaccgtgcctaaaaatgccaagttttggccaccacagtgggctctgtcactgacagctgtgcacgctgtatcatgaaggccttaggctggacttctgatcaatgcttatgtatctgtagccatcttgatcagaatgatccaggcaagggccgccgtgtctccactgcccgagaggtatgcaaagaacaaagctctaagagcaagcgttgagtctccctgcattggcccttagggatctgctttgataaaaatctgagactggatcagagggctggaaataagctttttttggagacggagtttcgctcttgttgcccaggctggagtgtagtggagcgatctcagctcactgcaaccttgcctgctgggttcaagtgattctcctgcctcaggatc

SEQ ID NO: 194 - DNA, 1745 bp, Homo sapiens
cctgacgctttgatggtatctgcaagcgtttttgctgatcttatctctgccccctgaatattaattccctaatctggtagcaatccatctccccagtgaaggacctactagaggcaggtggggggagccaccatcagatcatcaagcataagaataatacaaaggggagggattcttctgcaaccaagaggcaagaggcgagagaaggaaaaaaaaaaaaaaagcgatgagttcaccaaatatatggagcacaggaagctcagtctactcgactcctgtattttcacagaaaatgacggtgtggattctgctcctgctgtcgctctaccctggcttcactagccagaaatctgatgatgactatgaagattatgcttctaacaaaacatgggtcttgactccaaaagttcctgagggtgatgtcactgtcatcttaaacaacctgctggaaggatatgacaataaacttcggcctgatataggagtgaagccaacgttaattcacacagacatgtatgtgaatagcattggtccagtgaacgctatcaatatggaatacactattgatatattttttgcgcaaatgtggtatgacagacgtttgaaatttaacagcaccattaaagtcctccgattgaacagcaacatggtggggaaaatctggattccagacactttcttcagaaattccaaaaaagctgatgcacactggatcaccacccccaacaggatgctgagaatttggaatgatggtcgagtgctctactccctaaggttgacaattgatgctgagtgccaattacaattgcacaattttccaatggatgaacactcctgccccttggagttctccagttatggctatccacgtgaagaaattgtttatcaatggaagcgaagttctgttgaagtgggcgacacaagatcctggaggctttatcaattctcatttgttggtctaagaaataccaccgaagtagtgaagacaacttccggagattatgtggtcatgtctgtctactttgatctgagcagaagaatgggatactttaccatccagacctatatcccctgcacactcattgtcgtcctatcctgggtgtctttctggatcaataaggatgctgttccagccagaacatctttaggtatcaccactgtcctgacaatgaccaccctcagcaccattgcccggaaatcgctccccaaggtctcctatgtcacagcgatggatctctttgtatctgtttgtttcatctttgtcttctctgctctggtggagtatggcaccttgcattattttgtcagcaaccggaaaccaagcaaggacaaagataaaaagaagaaaaaccctgcccctaccattgatatccgcccaagatcagcaaccattcaaatgaataatgctacacaccttcaagagagagatgaagagtacggctatgagtgtctggacggcaaggactgtgccagttttttctgctgttttgaagattgtcgaacaggagcttggagacatgggaggatacatatccgcattgccaaaatggactcctatgctcggatcttcttccccactgccttctgcctgtttaatctggtctattgggtctcctacctctacctgtgaggaggtatgggttttactgatatggttcttattcactgagtctcatggagagatgtctgttctaagtccacttaaataatcctctatgtggttgataagtatctgaatctgtttc

SEQ ID NO: 195 - DNA, 6299 bp, Homo sapiens
acggggatcgccggcgggcggcaagcggaggcggcccaggcccggcggtctccgagatgtcacgatggctgtggccatggtcaaactgtgtgaaagagcgggtctgccgctacttgctgcaccactacttaggtcacttcttccaagagcacctcagcctggaccagctcagcctcgatctgtacaagggcagcgttgccctgcgagacatccacctggaaatctggtctgtgaacgaggtgctggagtcaatggagtcaccgctggagctggtggaaggcttcgtgggctccatcgaggtggccgtgccctgggctgctctgctcaccgaccactgcacagtgcgcgtgtccggcctccagctcaccttgcagccccgccggggtccagcgccaggggctgccgactcacagagctgggcctcatgcatgaccacaagcctgcagctggcccaggagtgtctgcgggatgggctaccggagccctctgagccaccacagcccctggaggggctggagatgtttgcccagaccattgagactgtgcttcggaggatcaaagtgaccttcctggacactgtcgtgagggtggagcactctccgggtgatggggaacgtggtgtggccgtcgaggtccgtgtgcagagactggagtactgtgatgaggcagtgcgggacccaagccaggcgccgccggtggatgtgcatcagccgcctgccttcctgcacaagctgctgcagctggcaggggtccgcctgcactacgaggagctcccggcacaggaagagcctccagagccccccttgcagatcggcagctgctcagggtacatggagctgatggtgaagttgaagcaaaatgaggccttccctggccccaagttggaggtggcgggacagctgggctccctgcacctgctcctgaccccgaggcagctccagcaacttcaggaactgctcagcgccgtgagccttacagaccacgagggcctggctgacaagctgaacaagagccgcccgctaggtgccgaagacctgtggctgattgagcaggacctgaaccagcagctgcaggcaggggcagtggctgagcccctcagcccagacccccttaccaacccccttctcaacctggataacactgacctcttcttctccatggctggcctcacaagcagtgtggcctcagccctctctgagctctccctctccgatgtagacctggcctcctctgtgcgcagcgacatggcctcccgccggctctctgcccaggcccacccagctggcaagatggcccccaaccccctcctggacaccatgcgccctgactcgctgctgaagatgaccttggggggtgtgaccctgaccttgcttcagacgtctgccccatcttccggaccacctgacctcgccacgcactttttcaccgagtttgatgccaccaaggatgggcccttcggttcccgagacttccatcaccttcgaccacgcttccagagggcctgtccctgtagccatgttcggctaacgggcacagccgtgcagctgtcctgggagctgcggacgggcagtcggggccggcggacaaccagcatggaagtgcacttcgggcagctggaggtgctggagtgtctgtggccccggggcacctctgagcctgagtacacggagatcctgacctttcctggtacgctgggctcccaggcctcagctcggccctgcgcccatctgcgccacacacagatcctgcgccgtgtgcctaagagccgaccccggcgctcagttgcctgccattgccactcagaactggccctggacctggccaacttccaggcggacgtggagctgggggccctggaccggctggccgccctactgcgcctggccaccgtacctgctgagcctccagccggcctgctgacagagcccctgccggcgatggagcagcagacggtatttcggctctctgcaccccgggccacgctgcggctgcgcttccccattgccgacctgcggcctgagcgggacccctgggcgggccaggccgtgcgggctgagcagcttcggctggagctgagtgagccccagttccggtcagagcttagcagtgggcctggtcccccagtccccacccacctggaactcacctgctccgacctacatggtatctatgaagatggagggaagccacctgtcccttgcctgcgtgtctccaaagccctggaccccaagagcactgggcgcaagtacttcctgccccaggtagtggtgactgtgaacccccagtccagcagcacacagtgggaggtggccccggagaagggagaggaactggagctgtcagtggagagtccctgtgagctgcgggaacctgagccctcgcccttctcctctaagaggaccatgtatgagacagaggagatggtgatccctggagaccctgaggagatgaggacgttccagagccggaccctggcactgtcccgctgcagcctggaagtgatcctgcccagtgtccacatctttctgcccagcaaggaggtctacgagagcatctacaacaggatcaacaacgacctgctcatgtgggagcctgcagatctgcttcccacccccgaccccgccgcccagccctcgggcttccccggcccctcaggcttctggcacgacagctttaagatgtgcaagtcagccttcaagctggccaactgctttgatctcaccccagactcggactcggatgacgaggatgcccacttcttctcagtgggggcatcaggtggcccacaggccgctgcccctgaggccccaagtcttcacttgcagagcaccttctctacactggtgacagtgctgaaggggcggatcacagccctctgtgagaccaaggatgagggtgggaagcggctggaggctgtgcacggggagctggtgctggacatggagcacggtaccctcttcagcgtctcccagtactgtggccagccaggacttggctacttctgtctggaagctgaaaaggcaacactctaccaccgagcggccgtggatgactacccgctgcccagtcacctggaccttcccagtttcgctcccccggctcagctggccccaaccatctacccatcggaggaaggggtgaccgagcggggagcctcgggccgcaagggccagggccggggaccccacatgttgtccactgctgtgcgcatccacctggacccccacaagaatgtgaaggagttcctggtgacactgcggttgcacaaagccaccttgcgccactacatggccctgcccgagcagagctggcattcccagttgttggagttcctagacgtgctggatgaccctgtgctgggctacctgcccccgacggtcatcaccatcctgcacacacacctgttctcctgctctgtggactataggccactctacctcccagtgcgtgtcctcatcaccgcggagaccttcactctctccagcaacatcatcatggacacctccaccttcctgctcaggttcatcctcgatgactccgccttgtacctgtccgacaagtgtgaggtggagaccctggacctgcggcgagattatgtctgtgttttggatgttgacctcttggaacttgtgattaaaacctggaaagggagcaccgagggcaaactgagccagccactattcgagctgcgctgctccaacaatgtggtacacgtgcacagctgtgccgactcctgtgccctgctggtcaacctgctccagtacgtaatgagcacaggcgatctgcaccccccaccccggccccccagccccacggagatcgccggccagaagctctcggagagtcctgcctctctgccctcgtgccccccagtggagacggccctcatcaaccagcgtgacctggccgacgccctcctggacaccgagcgcagcctacgggagctggcccagccttcaggtggccacctccctcaggcgtcgcccatctccgtctacctattcccaggtgaacggagtggggccccacccccttcaccacctgtcgggggccctgctggcagcttagggtcatgctcagaggagaaggaagatgaaagggaagaggagggcgatggagacaccctggacagtgatgagttctgcatccttgatgctcccggcctgggcatcccgccccgagatggggagcctgtggtgacacagctgcatcccggccccatcgttgtgagggacggttacttctcacggccgatcggcagcacggacttgctgcgggcacctgcccatttcccagtgcccagcactcgggtggtgctacgtgaggtctccctcgtctggcacctctatgggggccgagactttggcccccaccccggccacagggcaagaactggcctctcaggtcccaggagctccccttcccgctgctctggccccaaccggccccagaactcatggcgcacgcaggggggcagcgggcggcagcaccatgtcctcatggagatccagctgagcaaggtaagcttccagcacgaggtgtacccagcggagccagccacaggccctgcggcccccagccaggagctggaggagcgaccgctgtcccgtcaggtgttcatcgtgcaggagctggaggtccgagaccggctcgcctcctcccagatcaacaagttcctgtacctacacacgagtgagcggatgccgcgacgtgcccactctaacatgctcaccatcaaagcgctgcatgtggcccccactaccaacctgggtgggcctgagtgctgtctccgcgtctcgctgatgcccctgcggctcaatgtggaccaggatgccctcttcttcctcaaggacttcttcactagtctggtggccggcatcaaccccgtggtcccaggggagacctccgctgaggctcgccccgagactcgagcccagcccagcagccccctggaagggcaggccgaaggcgtagagaccactggttcgcaggaggccccaggaggtggacacagcccctcccctcctgaccagcagcccatctacttcagagagttccgcttcacgtctgaggtccccatctggctggattaccatggcaagcacgtcacgatggaccaggtgggcacttttgctggcctcctcatcggcctggcccaactcaactgctccgagctgaagctaaagcggctctgttgcaggcacgggctcctgggtgtggacaaggtgctgggctatgccctcaacgagtggctgcaggacatccgcaagaaccagctgcccggcctgctgggaggcgtgggccccatgcactcggttgtccagctcttccaagggttccgggacctgctgtggctgcccattgagcagtacaggaaggatggccgcctcatgcgggggctgcagcgaggggctgcctcctttggctcatccacagcctctgccgccctggaactcagcaaccggttggtacaggctatccaggccacagctgagaccgtgtatgacatcctgtccccggcagcccccgtctcccgctccctgcaggataagcgctctgcgcggaggctgcgcaggggccagcagcctgccgacctgcgggagggtgtggccaaggcctacgacacagtgcgagagggcatcttggatacagctcagaccatctgtgacgtggcatcgcggggccatgagcagaaggggctgacgggcgccgtggggggcgtgatccgccagctgcccccgactgtggtgaagccgctcatcctggccacggaggccacgtccagcctgctcgggggcatgcgcaaccagattgtccccgacgcccacaaggaccacgccctcaagtggcgctcggacagtgcccaagactgagcctggggtgcccggcacccagagggtgctgcccaccatgctcctgagcctcccaagagctgcagcccacgggcccggcccggcctggcccttcaggggatggccactgtgaaggacgccttcccagcctgcccgttgccaatctgctgtgagaggggggcctccctgccttggggccttagccctggctctgcacttttcctccggggagaaaggacactgcccctcccccgacctgggcccacactgctgccttctcccaggacggaggcttttggaccctcggaccccatcccactcagccaagtgtctttctgtgtctggggggaggaggggatgatatccgtgtggttcgatgtattatttttaagctccgtgagtgcgtgggtcagtgtctgcatgaagtggaataaactgcccaccgcc

SEQ ID NO: 196 - DNA, 1966 bp, Homo sapiens
cctgatggagaatgctgtcctcgctgttggcgtaagtttctcaaatggcatagctattcttcagtgactaggtcagttctacatacatcctagacagccgagcacaacactggaaccccacccccatctccatcatgcttccattcagtttcttgctgcagcagctggttaactgactgcttatctgctgtacagatcccaaaactccattatgaagtacatcgtaattacccatctggattgcagtaatggcagtgaaggaatatgatcttggtatagctcattaattctgattttttgctttgaggaaaagagatacgtggcagcaacagctctaagttgactgcttttaatttaaccttagtggcacagagttaagaaaaatctgctcaccagagatattgacaggcttactgtgtaagcattggcctgatcgggcctggaagttttgcccctttcatctgtagggataagagggcctaagagaatagcagcaatctgagctctagagcaccaaaagaaataaggcacgatattgttccatagcacgttatccctggcttttgttaccagtaaaatgaatgactttgctgagacatacttagtgtagcaggtacaagttataaaagtgattcattacaactaagataaggaagaaaacaggaaaacagcacttgcccttcacacacacagaaacacacatgcacacacacacaaacacacccttgtcacagctcagaataaccaattccatccagggatcatattagcgatattggcactgtaatggtcgtttttacatttacatttattttctgttccgcattcacttaacatgtgcgtaaaagggaacaaagctagctggaggtagcaaagttttgaacttgaatcagggattgctaagaaaacttacaactaatgaccacagaaagtaagttctttgtcttctgtctgatacagctagatgtgattgtagccgtggtgcctgggcagatggtaaagaaacatgctgtcctcttatgacaatatgtgcagagaaggccccaaacgctggggtgagaggaacaacaaactgactaactcacggccgagttggagccagaaccaacaacagctcggctgccttcacactcatctgtcaaacacatggtgtatggctcccctgacagaaatgactcctataagcttcctcatactcgcgcattcttggaagtctgagactggaaatgcctacccagatatgttaagtcagtaaaggaaaactcatttgcaatgctgagaggagaaagaaaatcaatgaataggagagcatacactgtgggaaggctcagctgtactgagccaggcaaagcatccgattaccccactgctgtacacatcatgacctgggataaaccccttgggccgttggcctaagaaatatgttgcttttcatcctgtataactgcaactttgtgccggctcatattatgttctagagagctcatgtacaccatggtgaccatagttaataatactggattgtatgcttaaaatttgctaagagagtagatcttaagtcatcaccaaaaaaagtaactgtaagatgatggagatgtgttaattagcttgacggtggtaatcacaatatatgtgtatatcaaaacatcacattatacaccttaaatgtatataatatttgtcaattatcctcagtaaagccaaaaagaaataaatatattgcttttcaccctctggcgtggagggccctgaacagagccctctaaagaacagcttgtcctaatcatcatgtacctgatgaacctctgcttcccctgcagccagcgactctgcggacgatggctggtctccatggtccgagtggacctcctgttctacgagctgtggcaatggaattcagcagcgcgggcgctcctgcgatagcctcaacaaccgatgtgagggctcctcggtccagacacggacc

SEQ ID NO: 197 - DNA, 1799 bp, Homo sapiens
cctctctgtgctgggttcctccagtgtagaggagaggcaggtacagcctgtcctcctggggacatggcatgagggccgcgtcctcacagcgcattctgtgttccagcatccccgaccagccccaaggtcttcccgctgagcctcgacagcaccccccaagatgggaacgtggtcgtcgcatgcctggtccagggcttcttcccccaggagccactcagtgtgacctggagcgaaagcggacagaacgtgaccgccagaaacttcccacctagccaggatgcctccggggacctgtacaccacgagcagccagctgaccctgccggccacacagtgcccagacggcaagtccgtgacatgccacgtgaagcactacacgaattccagccaggatgtgactgtgccctgccgaggtcagagggcaggctggggagtggggcggggccaccccgtcctgccctgacactgcgcctgcacccgtgttccccacagggagccgccccttcactcacaccagagtggaccgcgggccgagccccaggaggtggtggtggacaggccaggaggggcgaggcgggggcacggggaagggcgttctgaccagctcaggccatctctccactccagttcccccacctcccccatgctgccacccccgactgtcgctgcaccgaccggccctcgaggacctgctcttaggttcagaagcgaacctcacgtgcacactgaccggcctgagagatgcctctggtgccaccttcacctggacgccctcaagtgggaagagcgctgttcaaggaccacctgagcgtgacctctgtggctgctacagcgtgtccagtgtcctgcctggctgtgcccagccatggaaccatggggagaccttcacctgcactgctgcccaccccgagttgaagaccccactaaccgccaacatcacaaaatccggtgggtccagaccctgctcggggccctgctcagtgctctggtttgcaaagcatattcccggcctgcctcctccctcccaatcctgggctccagtgctcatgccaagtacagagggaaactgaggcaggctgaggggccaggacacagcccagggtgcccaccagagcagaggggctctctcatcccctgcccagccccctgacctggctctctaccctccaggaaacacattccggcccgaggtccacctgctgccgccgccgtcggaggagctggccctgaacgagctggtgacgctgacgtgcctggcacgtggcttcagccccaaggatgtgctggttcgctggctgcaggggtcacaggagctgccccgcgagaagtacctgacttgggcatcccggcaggagcccagccagggcaccaccaccttcgctgtgaccagcatactgcgcgtggcagccgaggactggaagaagggggacaccttctcctgcatggtgggccacgaggccctgccgctggccttcacacagaagaccatcgaccgcttggcgggtaaacccacccatgtcaatgtgtctgttgtcatggcggaggtggacggcacctgctactgagccgcccgcctgtccccacccctgaataaactccatgctcccccaagcagccccacgcttccatccggcgcctgtctgtccatcctcagggtctcagcacttgggaaagggccagggcatggacagggaagaataccccctgccctgagcctcggggggcccctggcacccccatgagactttccaccctggtgtgagtgtgagttgtgagtgtgagagtgtgtggtgcaggagg

SEQ ID NO: 198 - DNA, 4646 bp, Homo sapiens
cctactctattcagatattctccagattcctaaagattagagatcatttctcattctcctaggagtactcacttcaggaagcaaccagataaaagagaggtgcaacggaagccagaacattcctcctggaaattcaacctgtttcgcagtttctcgaggaatcagcattcagtcaatccgggccgggagcagtcatctgtggtgaggctgattggctgggcaggaacagcgccggggcgtgggctgagcacagcgcttcgctctctttgccacaggaagcctgagctcattcgagtagcggctcttccaagctcaaagaagcagaggccgctgttcgtttcctttaggtctttccactaaagtcggagtatcttcttccaagatttcacgtcttggtggccgttccaaggagcgcgaggtcgggatggatcttgaaggggaccgcaatggaggagcaaagaagaagaacttttttaaactgaacaataaaagtgaaaaagataagaaggaaaagaaaccaactgtcagtgtattttcaatgtttcgctattcaaattggcttgacaagttgtatatggtggtgggaactttggctgccatcatccatggggctggacttcctctcatgatgctggtgtttggagaaatgacagatatctttgcaaatgcaggaaatttagaagatctgatgtcaaacatcactaatagaagtgatatcaatgatacagggttcttcatgaatctggaggaagacatgaccaggtatgcctattattacagtggaattggtgctggggtgctggttgctgcttacattcaggtttcattttggtgcctggcagctggaagacaaatacacaaaattagaaaacagttttttcatgctataatgcgacaggagataggctggtttgatgtgcacgatgttggggagcttaacacccgacttacagatgatgtctctaagattaatgaagttattggtgacaaaattggaatgttctttcagtcaatggcaacatttttcactgggtttatagtaggatttacacgtggttggaagctaacccttgtgattttggccatcagtcctgttcttggactgtcagctgctgtctgggcaaagatactatcttcatttactgataaagaactcttagcgtatgcaaaagctggagcagtagctgaagaggtcttggcagcaattagaactgtgattgcatttggaggacaaaagaaagaacttgaaaggtacaacaaaaatttagaagaagctaaaagaattgggataaagaaagctattacagccaatatttctataggtgctgctttcctgctgatctatgcatcttatgctctggccttctggtatgggaccaccttggtcctctcaggggaatattctattggacaagtactcactgtattcttttctgtattaattggggcttttagtgttggacaggcatctccaagcattgaagcatttgcaaatgcaagaggagcagcttatgaaatcttcaagataattgataataagccaagtattgacagctattcgaagagtgggcacaaaccagataatattaagggaaatttggaattcagaaatgttcacttcagttacccatctcgaaaagaagttaagatcttgaagggcctgaacctgaaggtgcagagtgggcagacggtggccctggttggaaacagtggctgtgggaagagcacaacagtccagctgatgcagaggctctatgaccccacagaggggatggtcagtgttgatggacaggatattaggaccataaatgtaaggtttctacgggaaatcattggtgtggtgagtcaggaacctgtattgtttgccaccacgatagctgaaaacattcgctatggccgtgaaaatgtcaccatggatgagattgagaaagctgtcaaggaagccaatgcctatgactttatcatgaaactgcctcataaatttgacaccctggttggagagagaggggcccagttgagtggtgggcagaagcagaggatcgccattgcacgtgccctggttcgcaaccccaagatcctcctgctggatgaggccacgtcagccttggacacagaaagcgaagcagtggttcaggtggctctggataaggccagaaaaggtcggaccaccattgtgatagctcatcgtttgtctacagttcgtaatgctgacgtcatcgctggtttcgatgatggagtcattgtggagaaaggaaatcatgatgaactcatgaaagagaaaggcatttacttcaaacttgtcacaatgcagacagcaggaaatgaagttgaattagaaaatgcagctgatgaatccaaaagtgaaattgatgccttggaaatgtcttcaaatgattcaagatccagtctaataagaaaaagatcaactcgtaggagtgtccgtggatcacaagcccaagacagaaagcttagtaccaaagaggctctggatgaaagtatacctccagtttccttttggaggattatgaagctaaatttaactgaatggccttattttgttgttggtgtattttgtgccattataaatggaggcctgcaaccagcatttgcaataatattttcaaagattataggggtttttacaagaattgatgatcctgaaacaaaacgacagaatagtaacttgttttcactattgtttctagcccttggaattatttcttttattacatttttccttcagggtttcacatttggcaaagctggagagatcctcaccaagcggctccgatacatggttttccgatccatgctcagacaggatgtgagttggtttgatgaccctaaaaacaccactggagcattgactaccaggctcgccaatgatgctgctcaagttaaaggggctataggttccaggcttgctgtaattacccagaatatagcaaatcttgggacaggaataattatatccttcatctatggttggcaactaacactgttactcttagcaattgtacccatcattgcaatagcaggagttgttgaaatgaaaatgttgtctggacaagcactgaaagataagaaagaactagaaggtgctgggaagatcgctactgaagcaatagaaaacttccgaaccgttgtttctttgactcaggagcagaagtttgaacatatgtatgctcagagtttgcaggtaccatacagaaactctttgaggaaagcacacatctttggaattacattttccttcacccaggcaatgatgtatttttcctatgctggatgtttccggtttggagcctacttggtggcacataaactcatgagctttgaggatgttctgttagtattttcagctgttgtctttggtgccatggccgtggggcaagtcagttcatttgctcctgactatgccaaagccaaaatatcagcagcccacatcatcatgatcattgaaaaaacccctttgattgacagctacagcacggaaggcctaatgccgaacacattggaaggaaatgtcacatttggtgaagttgtattcaactatcccacccgaccggacatcccagtgcttcagggactgagcctggaggtgaagaagggccagacgctggctctggtgggcagcagtggctgtgggaagagcacagtggtccagctcctggagcggttctacgaccccttggcagggaaagtgctgcttgatggcaaagaaataaagcgactgaatgttcagtggctccgagcacacctgggcatcgtgtcccaggagcccatcctgtttgactgcagcattgctgagaacattgcctatggagacaacagccgggtggtgtcacaggaagagatcgtgagggcagcaaaggaggccaacatacatgccttcatcgagtcactgcctaataaatatagcactaaagtaggagacaaaggaactcagctctctggtggccagaaacaacgcattgccatagctcgtgcccttgttagacagcctcatattttgcttttggatgaagccacgtcagctctggatacagaaagtgaaaaggttgtccaagaagccctggacaaagccagagaaggccgcacctgcattgtgattgctcaccgcctgtccaccatccagaatgcagacttaatagtggtgtttcagaatggcagagtcaaggagcatggcacgcatcagcagctgctggcacagaaaggcatctatttttcaatggtcagtgtccaggctggaacaaagcgccagtgaactctgactgtatgagatgttaaatactttttaatatttgtttagatatgacatttattcaaagttaaaagcaaacacttacagaattatgaagaggtatctgtttaacatttcctcagtcaagttcagagtcttcagagacttcgtaattaaaggaacagagtgagagacatcatcaagtggagagaaatcatagtttaaactgcattataaattttataacagaattaaagtagattttaaaagataaaatgtgtaattttgtttatattttcccatttggactgtaactgactgccttgctaaaagattatagaagtagcaaaaagtattgaaatgtttgcataaagtgtctataataaaactaaactttcatgtg

SEQ ID NO: 199 - DNA, 7247 bp, Homo sapiens
gggaatatattcactaaggattctatctgcttactgctacagacctatgtgttaaggaattcttctcctcctccttgcgtagaagttgatcagcactgtggtcagactgcatttatcttgtcattgccagaagaaatcttggacagaatgtaacagtacgtctctctctgattgcgatggaaggtgataaactgatactcctttattaaagttacatcgcactcaccacagaaaaccattctttaaagtgaatagaaaccaagcccttgtgaacacttctattgaacatgactcatggagaagagcttggctctgatgtgcaccaggattctattgttttaacttacctagaaggattactaatgcatcaggcagcagggggatcaggtactgccgttgacaaaaagtctgctgggcataatgaagaggatcagaactttaacatttctggcagtgcatttcccacctgtcaaagtaatggtccagttctcaatacacatacatatcagggatctggcatgctgcacctcaaaaaagccagactgttgcagtcttctgaggactggaatgcagcaaagcggaagaggctgtctgattctatcatgaatttaaacgtaaagaaggaagctttgctagctggcatggttgacagtgtccgtaaaggcaaacaggatagcacattactggcctctttgcttcagtcattcagctctaggctgcagactgttgctctgtcacaacaaatcaggcagagcctcaaggagcaaggatatgccctcagtcatgattctttaaaagtggagaaggatttaaggtgctatggtgttgcatcaagtcacttaaaaactttgttgaagaaaagtaaagttaaagatcaaaagcctgatacgaatcttcctgatgtgactaaaaacctcatcagagataggtttgcagagtctcctcatcatgttggacaaagtggaacaaaggtcatgagtgaaccgttgtcatgtgctgcaagattacaggctgttgcaagcatggtggaaaaaagggctagtcctgccacctcacctaaacctagtgttgcttgtagccagttagcattacttctgtcaagcgaagcccatttgcagcagtattctcgagaacacgctttaaaaacgcaaaatgcaaatcaagcagcaagtgaaagacttgctgctatggccagattgcaagaaaatggccagaaggatgttggcagttaccagctcccaaaaggaatgtcaagccatcttaatggtcaggcaagaacatcatcaagcaaactgatggctagcaaaagtagtgctacagtgtttcaaaatccaatgggtatcattccttcttcccctaaaaatgcaggttataagaactcactggaaagaaacaatataaaacaagctgctaacaatagtttgcttttacatcttcttaaaagccagactatacctaagccaatgaatggacacagtcacagtgagagaggaagcatttttgaggaaagtagtacacctacaactattgatgaatattcagataacaatcctagttttacagatgacagcagtggtgatgaaagttcttattccaactgtgttcccatagacttgtcttgcaaacacggaactgaaaaatcagaatctgaccaacctgtttccctggataacttcactcaatccttgctaaacacttgggatccaaaagtcccagatgtagatatcaaagaagatcaagatacctcaaagaattctaagctaaactcacaccagaaagtaacacttcttcaattgctacttggccataagaatgaagaaaatgtagaaaaaaacaccagccctcagggagtacacaatgatgtgagcaagttcaatacacaaaattatgcaaggacttctgtgatagaaagccccagtacaaatcggactactccagtgagcactccacctttacttacatcaagcaaagcagggtctcccatcaatctctctcaacactctctggtcatcaaatggaattccccaccatatgtctgcagtactcagtctgaaaagctaacaaatactgcatctaaccactcaatggaccttacaaaaagcaaagacccaccaggagagaaaccagcccaaaatgaaggtgcacagaactctgcaacgtttagtgccagtaagctgttacaaaatttagcacaatgtggaatgcagtcatccatgtcagtggaagagcagagacccagcaaacagctgttaactggaaacacagataaaccgataggtatgattgatagattaaatagccctttgctctcaaataaaacaaatgcagttgaagaaaataaagcatttagtagtcaaccaacaggtcctgaaccagggctttctggttctgaaatagaaaatctgcttgaaagacgtactgtcctccagttgctcctggggaacccaacaaagggaagagtgaaaaaaaaagagaaaactcccttaagagatgaaagtactcaggaacactcagagagagctttaagtgaacaaatactgatggtgaaaataaaatctgagccttgtgatgacttacaaattcctaacacaaatgtgcacttgagccatgatgctaagagtgccccattcttgggtatggctcctgctgtgcagagaagcgcacctgccttaccagtgtccgaagactttaaatcggagcctgtttcacctcaggatttttctttctccaagaatggtctgctaagtcgattgctaagacaaaatcaagatagttacctggcagatgattcagacaggagtcacagaaataatgaaatggcacttctagaatcaaagaatctttgcatggtccctaagaaaaggaagctttatactgagccattagaaaatccatttaaaaagatgaaaaacaacattgttgatgctgcaaacaatcacagtgccccagaagtactgtatgggtccttgcttaaccaggaagagctgaaatttagcagaaatgatcttgaatttaaatatcctgctggtcatggctcagccagcgaaagtgaacacaggagttgggccagagagagcaaaagctttaatgttctgaaacagctgcttctctcagaaaactgtgtgcgagatttgtccccgcacagaagtaactctgtggctgacagtaaaaagaaaggacacaaaaataatgtgaccaacagcaaacctgaatttagcatttcttctttaaatggactgatgtacagttccactcagcccagcagttgcatggataacaggacattttcatacccaggtgtagtaaaaactcctgtgagtcctactttccctgagcacttgggctgtgcagggtctagaccagaatctgggcttttgaatgggtgttccatgcccagtgagaaaggacccattaagtgggttatcactgatgcggagaagaatgagtatgaaaaagactctccaagattgaccaaaaccaacccaatactatattacatgcttcaaaaaggaggcaattctgttgccagtcgagaaacacaagacaaggacatttggagggaggcttcatctgctgaaagtgtctcacaggtcacagccaaagaagagttacttcctactgcagaaacgaaagcttctttctttaatttaagaagcccttacaatagccatatgggaaataatgcttctcgcccacacagcgcaaatggagaagtttatggacttctgggaagcgtgctaacgataaagaaagaatcagaataaaatgtacctgccatccagttttggatctttttaaaactaatgagtatgaacttgagatctgtataaataagagcatgatttgaaaaaagcatggtataattgaaacttttttcattttgaaaagtattggttactggtgatgttgaaatatgcatactaatttttgcttaacattagatgtcatgaggaaactactgaactagcaattggttgtttaacacttctgtatgcgtcagataacaactgtgagtagcctatgaatgaaattcttttataaatattaggcataaattaaaatgtaaaactccattcatagtggattaatgcattttgctgcctttattagggtactttattttgcttttcagaagtcagcctacataacacatttttaaagtctaaactgttaaacaactctttaaaggataattatccaataaaaaaaaacctagtgctgattcacagcttattatccaattcaaaaataaattagaaaaatatatgcttacatttttcacttttgctaaaaagaaaaaaaaaggtgtttatttttaactcttggaagaggttttgtggttcccaatgtgtctgtcccaccctgagccttttcaatatatatttctttaaaccttgtgctacttagtaaaaattgattacaattgagggaagtttgatagatcctttaaaaaaaaggcagatttccattttttgtattttaactactttactaaattaatactcctccttttacaaattagaaaagttaacatttatctttaggtggtttcctgaaaagttgaatatttaagaaattgtttttaacagaagcaaaatggcttttctttggacagttttcaccatctcttgtaaaagttaattctcaccattcctgtggtacctgcgagtgttatgaccaggattccttaaacctgaactcagaccacttgcattagaaccatctggagcacttgttttaaaatgcagattcataggcagcatctcagatctacagaacaagaatctctgctaagtggacctggaatcttccatctgcatcttaacatgctctctaggtgtttcttgtgtttgagaaccatgacttatgactttcctcagaacatgagactgtaaaacaaaaacaaaaaactatgtgatgcctctattttccccaatacagtcacacatcagctcaaaatttgcaatattgtagttatatattaccgttatatctttggaaatccgggttcagaacactttttatgacaaaaattgggtggaggggataactttcatatctggctcaacatctcaggaaaatctgtgattatttgtgtgttctaatgagtaacatctacttagttagccttagggatggaaaaacagggccacttaccaaactcaggtgattccaggatggtttggaaacttctcctgaatgcatccttaacctttattaaaaccattgtcctaagaacaatgccaacaaagcttacaacatttagtttaaacccaagaaggacactaaactagattgactaataaaagtacaaggcacatatacgtgacagaattggtactcaatcactccattggatcttttactttaaagtagtgatgaaaagtacatgttgatactgtcttagaagaaattaatatattagtgaagccacatggggtttcagttgcgaaacaggtctgtttttatgttcagtttgtacaatccacaattcattcaccagatattttgttcttaattgtgttccaggttagcaaatgacctatcaaaaattattctataatcactactagttaggatattgatttaaaattgttctacttgaagtggtttctaagatttttatatttaaaaataggtgtgatttcctaatatgatctaaaaccctaaatggttatttttcctcagaatgatttgtaaatagctactggaaatattatacagtaataggagtgggtattatgcaacatcatggagagtgaaggcataggcttattctgacataaaattccactggccagttgaatatattctattccatgtccatactctgacaatcttattgtcaacactatataaataagcttttaaacaagtcatttttcttgatcgttgtggaaggtttggagccttagaggtatgtcagaaaaaatatgttggtattctcccttgggtagggggaaatgacctttttacaagagagatgaaatttaggtcagggaaaagaccaagggccagcatgctacttttgtgtgtgtgtgtgtgggttttgttttgttttttttggttggctggttgttttcattattattaacaaaggaatgagaatatgtaatacttaaataaacatgaccacgaagaatgctgttctgatttactagagaatgttcccaatttgaatttagggtgattttaaagaacagtgagaaagggcatacatccacagattcactttgtttatgcatatgtagatacaaggatgcacatatacacattttcaaggactattttagatatctagacaatttcttctaataaagtcatttgtgaaagggtactacagcttattgacatcagtaaggtagcattcattacctgtttattctctgctgcatcttacagaagagtaaactggtgagagtatatattttatatatatatatatatataatatgtatatatatatatattgacttgttacatgaagatgttaaaatcggtttttaaaggtgatgtaaatagtgatttccttaatgaaaaatacatattttgtattgttctaatgcaacagaaaagccttttaatctctttggttcctgtatattccatgtataagtgtaaatataatcagacaggtttaaaagttgtgcatgtatgtatacagttgcaagtctggacaaatgtatagaataaaccttttatttaagttgtgattacctgctgcatgaaaagtggcatgggggaccctgtgcatctgtgcatttggcaaaatgtcttaacaaatcagatcagatgttcatcctaacatgacagtattccatttctggacatgacgtctgtggtttaagctttgtgaaagaatgtgctttgattcgaagggtcttaaagaatttttttaatcgtcaaccacttttaaacataaagaattcacacaactactttcatgaattttttaatcccattgcaaacattattccaagagtatcccagtattagcaatactggaatataggcacattaccattcatagtaagaattctggtgtttacacaaccaaatttgatgcgatctgctcagtaatataatttgccatttttattagaaatttaatttcttcatgtgatgtcatgaaactgtacatactgcagtgtgaatttttttgttttgttttttaatcttttagtgtttacttcctgcagtgaatttgaataaatgagaaaaaatgcaaaaaaaaaaaaaaaaaaaaa

SEQ ID NO: 200 - DNA, 2409 bp, Homo sapiens
gaattcgggcgcgaagcggccggcctgggcgccgactgcagagccgggaggctggtggtcatgccggggttcctggttcgcatcctccttctgctgctggttctgctgcttctgggccctacgcgcggcttgcgcaatgccacccagaggatgtttgaaattgactatagccgggactccttcctcaaggatggccagccatttcgctacatctcaggaagcattcactactcccgtgtgccccgcttctactggaaggaccggctgctgaagatgaagatggctgggctgaacgccatccagacgtatgtgccctggaactttcatgagccctggccaggacagtaccagttttctgaggaccatgatgtggaatattttcttcggctggctcatgagctgggactgctggttatcctgaggcccgggccctacatctgtgcagagtgggaaatgggaggattacctgcttggctgctagagaaagagtctattcttctccgctcctccgacccagattacctggcagctgtggacaagtggttgggagtccttctgcccaagatgaagcctctcctctatcagaatggagggccagttataacagtgcaggttgaaaatgaatatggcagctactttgcctgtgattttgactacctgcgcttcctgcagaagcgctttcgccaccatctgggggatgatgtggttctgtttaccactgatggagcacataaaacattcctgaaatgtggggccctgcagggcctctacaccacggtggactttggaacaggcagcaacatcacagatgctttcctaagccagaggaagtgtgagcccaaaggacccttgatcaattctgaattctatactggctggctagatcactggggccaacctcactccacaatcaagaccgaagcagtggcttcctccctctatgatatacttgcccgtggggcgagtgtgaacttgtacatgtttataggtgggaccaattttgcctattggaatggggccaactcaccctatgcagcacagcccaccagctacgactatgatgccccactgagtgaggctggggacctcactgagaagtattttgctctgcgaaacatcatccagaagtttgaaaaagtaccagaaggtcctatccctccatctacaccaaagtttgcatatggaaaggtcactttggaaaagttaaagacagtgggagcagctctggacattctgtgtccctctgggcccatcaaaagcctttatcccttgacatttatccaggtgaaacagcattatgggtttgtgctgtaccggacaacacttcctcaagattgcagcaacccagcacctctctcttcacccctcaatggagtccacgatcgagcatatgttgctgtggatgggatcccccagggagtccttgagcgaaacaatgtgatcactctgaacataacagggaaagctggagccactctggaccttctggtagagaacatgggacgtgtgaactatggtgcatatatcaacgattttaagggtttggtttctaacctgactctcagttccaatatcctcacggactggacgatctttccactggacactgaggatgcagtgcgcagccacctggggggctggggacaccgtgacagtggccaccatgatgaagcctgggcccacaactcatccaactacacgctcccggccttttatatggggaacttctccattcccagtgggatcccagacttgccccaggacacctttatccagtttcctggatggaccaagggccaggtctggattaatggctttaaccttggccgctattggccagcccggggccctcagttgaccttgtttgtgccccagcacatcctgatgacctcggccccaaacaccatcaccgtgctggaactggagtgggcaccctgcagcagtgatgatccagaactatgtgctgtgacgttcgtggacaggccagttattggctcatctgtgacctacgatcatccctccaaacctgttgaaaaaagactcatgcccccacccccgcaaaaaaacaaagattcatggctggaccatgtatgatgatgaaagcctgtgtctttgagggattctaccctgaacatacctcacagatcctccctgtcatgccacatttcactgattggaatgtggaaatggaaaaggaatttaggatgtgcattttcacctgaggtttccctgcatccctgcagtgccaaagccccaccttcagggaccacctggaatgtgtgaggggctgacagcacagtaacgtgcatacatatctgcagggctggaatggaagctttaaaggtggtagtgatttttattttggaagaatcatgttacctttttgttaaataaaatttgcccgaattc

SEQ ID NO: 201 - DNA, 1716 bp, Homo sapiens
ggtgagtgatccggaggagatggagcttcgggggctgcagcgggagtacccggtccccgcctccaagaggccgcccctccgcggcgtagagcgcagctacgcctcgcccagtgacaactcgtcggcagaggaggaggaccccgacggcgaggaggagcgctgcgctctgggcacagccggcagcgcggaaggctgcaagaggaagcggccccgcggggctgggggcggcggcgcaggtggtagcgcgggcggtggtggcaagaagcccctcccggccaagggctcagccgcagagtgcaagcagtcgcagcggaacgcggccaacgcccgtgagcgtgcccggatgcgcgtgctgagcaaagccttctccaggctcaagaccagcctgccctgggtgccccccgacactaagctctccaagctggacacgctccggctggcttccagttacatcgctcacctgcggcagctgttgcaggaggaccgctatgagaacggctacgtgcacccagtgaacctgacatggccattcgtggtctcgggaagaccggactctgacaccaaagaagtttccgcagccaacagactatgtggaaccaccgcttaaatcggactggaactcacttgatgggattattcgttaaatgcgagtgtttgggggccacggagagaagggagagctcgtgagatgggaagaagtttccgctggattctccttgacccttcccctttccctggaactgtgatcgtgacaggtggcgggtgtggctgtcactgcacagcgcccacggctacagctgcgccggatctgggcgaccacgttttgcctctccaaaaagagcttcctttcgtgacgagacgcggacgcaggtccaccctcgggccctagctctgtagactaactctcggctgctgccccagcccgcgccagacagcccacggatccgttctcagcggagccagattcatcgcacacgtgcgggacggttccacacagccccggcctttcgcggtgacacaatggttagggaacggttagaacgcgctctacatccgctttaaagacagaggtctagacgtgagatccgcgtcgggacagggttttaagtgacaaagaagggcgagtggcttctctgggccgggttcgtactccagcacagcgcccttctaacgggcgggaggaaggccgctgctcgcagggctaggtggagacacacttcccagatcaccgcaggcgggttttacccggagagctctaggccgttcggcctccctgccgggtggcttcttcaatcccgtctccttcccaagctcccggctttttctaatcaggcaggcgtctgtcaaccctctccacttctgggctgaagcctccccaagccccgtgcgccaacctgtgtggggtcttcttcgggcctccctttccgccccgctcctgctcctacctgcagcacccccagctccgactccagactctctgcatcaggtctccccactccacgctccgggcgccccaactccaacaccacgtcctgccgcgcaggttcttccccgcgcggaggagcgcgcagggtgggcggcttaccatagcaagtgatcctgcgatagggaacgcgcccttgccccgaggctgcactaccacaggaaataacatatgtaaataaatttatttttttatgaataataaaacgcgctgtaaaaaccgtggacggaaaa

SEQ ID NO: 202 - DNA, 708 bp, Homo sapiens
gtcatggagggagcaggagctggatccggcttccggaaggagctggtgagcaggctgctgcacctgcacttcaaggatgacaagaccaaagaagcagcagtccgcggcgtgcggcaggcccaggcagaagacgcgctccgtgtggacgtggaccagctggagaagctgcttccgcagctgctcctggacttctagggatctcagacgtggcttgagccaccccagaggagcccctggtccacagaagcaggccttgtgtttccagcggcttctgataagaggcagggaaggacctgaaggatttggagttgattcaaacaagatctctgggagtctccagcctgtgcaagaaggggcaggactgcagtgcactgcgggccttggaagtgtccagtggggacactggtgtgggaaggggcagcacctggggagtccctgcctctcctccctgggacaatagtgtgcatgccacccggggtcctacaggcaggtgctgggaaaggcctggccagcaggtagcctgtgtgtttgacaaacagcagctggcagcgctgcctcctgcccacattcctgccacccgacatcaaagctggcgtgtgacctttccagccatgcgatattccccttggaagatgcttccccaggctataaatttgttctcacaaagcaacatcaataaatcaaaactgtctctcccaaaaaaaaaaa

SEQ ID NO: 203 - DNA, 896 bp, Homo sapiens
ggggaaagcagcccattcctgggtcagagactcccaccccagctcagagggagcaggggcccagcagggacggaccctcattcctcccagggaccccagacctctgtctctctcgggccttggctccttgaacttttggccgccatgtgcttcccgaagtcctctctgatgacatgaagaagctgaaggcccgaatgcaccaggccatagaaagattttatgataaaatgcgaaatgcagaatcaggacgtggacaggtgatgtcgagcctggcagagctggaggacgacttcaaagagggctacctggagacagtggcggcttattatgaggagcagcacccagagctcactcctctacttgaaaaagaaagagatggattacggtgccgaggcaacagatcccctgtcccggatgttgaggatcccgcaaccgaggagcctggggagagcttttgtgataaggtcatgaggtggttccaggccatgctgcgacggctgtagacctggtggcacggggtcctggcctgggtgaaggagaaggtggtggccctggtccatgcagtgcaggccctctggaaacagttccagagtttctgctgctctctgtcagagctcttcatgtcctctttccagtctacggagcacggggggacaaggaggagctgacaccccagaagtgttctgaaccccaatcctcaaaatgaagatactgacaccacctttgccctccccgtcaccgcgcacccaccctgacccctccctcagctgtcctgtgccccaccctctcccgcacactcagtccccctgcctgggcgttcctgccgcagctctgacctggcggtcgccctggcatcttaataaaacctgcttatacttcctggcaggggagatacc

SEQ ID NO: 204 - DNA, 1870 bp, Homo sapiens
taaaatggacgctaaactatgaaaacagtgtgacattgttctctgttcttccagagccagtaacatgcttgctcgtgctttctacttctagctgatcattcttttcccaacatatatttacaaatttaccaaattttacctagaattttaggaccaaatggttctcactctttatgctgcaaagacctggatgatgtttggtaactatagaaaaatagaaattacactcaggatcactgttactgctattgccactgatgattcctgcaaaaatataatcgaagttttccatcaaatgtataatatgctattaatacacattagatgataacagttgttccatgaatgattctatgaagctatgcatcttagacctcttgagctgtgaattagcactattttctatagttacttattctctggatcattttataatttccatattaatttcaaatatgctcgtgttattcttcagtgatttccacaattgtgcattttattctttggtttaagtactgaagcatataatgaaagtaattgctaagtagcagcttaaaaattcaattatccgattgtatttaacatctttaagagcatgatcataaagagctatttttgacattttttttttactttttaacatttagagttagtaagggttttatatctcttctgtccatattgttttcaaaggaatgaggtgtttaggtggctggaaaagcatttgtaggaagttagatttgaatatagacaaggtgggttattcacgttgagaatgttatttgaagaatgcctgtgaagccaggtgtgggttctactcagtgccatagatagactgagtcttctctcgtaggttaccattacatagtaattttgattctgaatttcacattaaattatttgagtttatacagacctaaattttaaaatctgtacatatattattttgatgtattaagatgaatattgctgatttaaattttatttatgcacatacttaaaggacagaaatgtctgggaaagtaattgttaaataatgatatgtaactttttaactttttaaataaataacaagatttttaatgtgtgtctccctcagggttgtttaaagttttttttctccctcaagtataaatagtggtaactatatgttttgtatcttctagcaccaactgctgtaaagcaatgctgcaaataatgcttgaatacaagtgctaagccaacaacagaataaatacttttatagtagttttataatcctgaaattcgaaagctttcccaattgcacttgcatctaaacaaaactgttgcagtttttactctatttattttgttccccatgtttatgaaagtcctgcacagtttcaaaggcatggtaaataatatatcaatgtttatgtagtctgttacagaaacagctatagataacattatccagtgaagagcaaaattcaagctttagaaaatattcatgcatgcaattttgacatatctaaaaataggtttttgtatatttatggtgggaggtggttgggaacttttaacaaaatggggtgttaatttttgtacagtctgtgggcatttacacatttttaatgtattaaaatttggtaattatgtgtacattaaattaataaaagttacttctagttatgatttgtgaattccctaagaccttggatttttttaagtaactttatatcagaaatgatactgcatctttatatttttaaaattgtattgctgctcaagaatggtaccctcttgtcaaaaaggcatacattcataattgtacattcagcattgtaaataatcttatgaaaccttttttgattgaagctattcaaaataaaaattttaatgaatgaaa

SEQ ID NO: 205 - DNA, 2178 bp, Homo sapiens
gtagtctgagcgctacccggttgctgctgcccaaggaccgcggagtcggacgcaggcagaccatgtggaccctggtgagctgggtggccttaacagcagggctggtggctggaacgcggtgcccagatggtcagttctgccctgtggcctgctgcctggaccccggaggagccagctacagctgctgccgtccccttctggacaaatggcccacaacactgagcaggcatctgggtggcccctgccaggttgatgcccactgctctgccggccactcctgcatctttaccgtctcagggacttccagttgctgccccttcccagaggccgtggcatgcggggatggccatcactgctgcccacggggcttccactgcagtgcagacgggcgatcctgcttccaaagatcaggtaacaactccgtgggtgccatccagtgccctgatagtcagttcgaatgcccggacttctccacgtgctgtgttatggtcgatggctcctgggggtgctgccccatgccccaggcttcctgctgtgaagacagggtgcactgctgtccgcacggtgccttctgcgacctggttcacacccgctgcatcacacccacgggcacccaccccctggcaaagaagctccctgcccagaggactaacagggcagtggccttgtccagctcggtcatgtgtccggacgcacggtcccggtgccctgatggttctacctgctgtgagctgcccagtgggaagtatggctgctgcccaatgcccaacgccacctgctgctccgatcacctgcactgctgcccccaagacactgtgtgtgacctgatccagagtaagtgcctctccaaggagaacgctaccacggacctcctcactaagctgcctgcgcacacagtgggggatgtgaaatgtgacatggaggtgagctgcccagatggctatacctgctgccgtctacagtcgggggcctggggctgctgcccttttacccaggctgtgtgctgtgaggaccacatacactgctgtcccgcggggtttacgtgtgacacgcagaagggtacctgtgaacaggggccccaccaggtgccctggatggagaaggccccagctcacctcagcctgccagacccacaagccttgaagagagatgtcccctgtgataatgtcagcagctgtccctcctccgatacctgctgccaactcacgtctggggagtggggctgctgtccaatcccagaggctgtctgctgctcggaccaccagcactgctgcccccagggctacacgtgtgtagctgaggggcagtgtcagcgaggaagcgagatcgtggctggactggagaagatgcctgcccgccgggcttccttatcccaccccagagacatcggctgtgaccagcacaccagctgcccggtggggcagacctgctgcccgagcctgggtgggagctgggcctgctgccagttgccccatgctgtgtgctgcgaggatcgccagcactgctgcccggctggctacacctgcaacgtgaaggctcgatcctgcgagaaggaagtggtctctgcccagcctgccaccttcctggcccgtagccctcacgtgggtgtgaaggacgtggagtgtggggaaggacacttctgccatgataaccagacctgctgccgagacaaccgacagggctgggcctgctgtccctaccgccagggcgtctgttgtgctgatcggcgccactgctgtcctgctggcttccgctgcgcagccaggggtaccaagtgtttgcgcagggaggccccgcgctgggacgcccctttgagggacccagccttgagacagctgctgtgagggacagtactgaagactctgcagccctcgggaccccactcggagggtgccctctgctcaggcctccctagcacctccccctaaccaaattctccctggaccccattctgagctccccatcaccatgggaggtggggcctcaatctaaggccttccctgtcagaagggggttgtggcaaaagccacattacaagctgccatcccctccccgtttcagtggaccctgtggccaggtgcttttccctatccacaggggtgtttgtgtgtgtgcgcgtgtgcgtttcaataaagtttgtacactttcaaaaaaaaaaaaaaaaaaaaaaaaaaaaaa

SEQ ID NO: 206 - DNA, 4627 bp, Homo sapiens
tcacttgcctgatatttccagtgtcagagggacacagccaacgtggggtcccttctaggctgacagccgctctccagccactgccgcgagcccgtctgctcccgccctgcccgtgcactctccgcagccgccctccgccaagccccagcgcccgctcccatcgccgatgaccgcggggaggaggatggagatgctctgtgccggcagggtccctgcgctgctgctctgcctgggtttccatcttctacaggcagtcctcagtacaactgtgattccatcatgtatcccaggagagtccagtgataactgcacagctttagttcagacagaagacaatccacgtgtggctcaagtgtcaataacaaagtgtagctctgacatgaatggctattgtttgcatggacagtgcatctatctggtggacatgagtcaaaactactgcaggtgtgaagtgggttatactggtgtccgatgtgaacacttctttttaaccgtccaccaacctttaagcaaagagtatgtggctttgaccgtgattcttattattttgtttcttatcacagtcgtcggttccacatattatttctgcagatggtacagaaatcgaaaaagtaaagaaccaaagaaggaatatgagagagttacctcaggggatccagagttgccgcaagtctgaatggcgccatcaaacttatgggcagggataacagtgtgcctggttaatattaatattccattttattaataatatttatgttgggtcaagtgttaggtcaataacactgtattttaatgtacttgaaaaatgtttttatttttgttttatttttgacagactatttgctaatgtataatgtgcagaaaatatttaatatcaaaagaaaattgatatttttatacaagtaatttcctgagctaaatgcttcattgaaagcttcaaagtttatatgcctggtgcacagtgcttagaagtaagcaattcccaggtcatagctcaagaattgttagcaaatgacagatttctgtaagcctatatatatagtcaaatcgatttagtaagtatgttttttatgttcctcaaatcagtgataattggtttgactgtaccatggtttgatatgtagttggcaccatggtatcatatattaaaacaataatgcaattagaatttgggagaagcaaatataggtcctgtgttaaacactacacatttgaaacaagctaaccctggggagtctatggtctcttcactcaggtctcagctataattctgttatatgaggggcagtggacagttccctatgccaactcacgactcctacaggtactagtcactcatctaccagattctgcctatgtaaaatgaattgaaaaacaattttctgtaatcttttatttaagtagtgggcatttcatagcttcacaatgttccttttttgtatattacaacatttatgtgaggtaattattgctcaacagacaattagaaaaaagtccacacttgaagcctaaatttgtgctttttaagaatatttttagactatttctttttataggggctttgctgaattctaacattaaatcacagcccaaaatttgatggactaattattattttaaaatatatgaagacaataattctacatgttgtcttaagatggaaatacagttatttcatcttttattcaaggaagttttaactttaatacagctcagtaaatggcttcttctagaatgtaaagttatgtatttaaagttgtatcttgacacaggaaatgggaaaaaacttaaaaattaatatggtgtatttttccaaatgaaaaatctcaattgaaagcttttaaaatgtagaaacttaaacacaccttcctgtggaggctgagatgaaaactagggctcattttcctgacatttgtttattttttggaagagacaaagatttcttctgcactctgagcccataggtctcagagagttaataggagtatttttgggctattgcataaggagccactgctgccaccacttttggattttatgggaggctccttcatcgaatgctaaacctttgagtagagtctccctggatcacataccaggtcagggaggatctgttcttcctctacgtttatcctggcatgtgctagggtaaacgaaggcataataagccatggctgacctctggagcaccaggtgccaggacttgtctccatgtgtatccatgcattatataccctggtgcaatcacacgactgtcatctaaagtcctggccctggcccttactattaggaaaataaacagacaaaaacaagtaaatatatatggtcctatacatattgtatatatattcatatacaaacatgtatgtatacatgaccttaatggatcatagaattgcagtcatttggtgctctgctaaccatttatataaaacttaaaaacaagagaaaagaaaaatcaattagatctaaacagttatttctgtttcctatttaatatagctgaagtcaaaatatgtaagaacacattttaaatactctacttacagttggccctctgtggttagttccacatctgtggattcaaccaaccaaggacggaaaatgcttaaaaaataatacaacaacaacaaaaaatacattataacaactatttacttttttttttttctttttgagatggagtctcgctctgttgcccaggttggagtgcagtggcacgatctcggctcactgcaacctcacctcccgggttcaagagatcctcctgcctcagcctcctgagcagctgggactacaggcgcatgccaccatgcccagctaatttttgtatttttagtagaggcggggtttcaccatgttggccaggatggtctcaatctcctaaccttgagatccaccctccacagcctcccaaactgctgggattacaggcgtgagccaccgcacgtagcatttacattaggtattacaagtaatgtaaagatgatttaagtatacaggaggatgtgaataggttatatgcaagcactatgcccttttatataagtgacttgaacatctgtgcccgattttagtatgtgcaggggggcgatctgggaatcagtcccctgtggataccaaggtacaactgtatttattaacgcttactagatgtgaggagagtctgaatattttcagtgatcttggctgtttcaaaaaaatctattgacttttcaataaatcagctgcaatccatttatttcatttacaaaagatttattgtaagcctctcaatcttggtttttcagttgatcttaagcatgtcaattcataaaaacaagtcatttttgtatttttcatctttaagaatgcttaaaaaagctaatccctaaaatagttagatctttgtaaatgcatattaaataataaagtatgacccacattactttttatgggtgaaaataagacaaaaataatagttttagtgaggatggtgctgagtaaacataaaaactgatttgctctcagctgatgtgtcctgtacacagtgggaagattttagttcacacttagtctaactcccccattttacagatttctcactatatatatttctagaaggggctatgcatattcaatgtattgagaaccaaagcaaccacaaatgcataaatgcataatttatggtcttcaaccaaggccacataataacccagttaacttactctttaaccaggaatattaagttctataactagtactcaaggtttaaccttaaaattaagatttccttaaccttaaccttaaaattgatattatattaaacatacataatacaatgtaactccactgttctcctgaatattttttgctctaatctctctgccgaaagtcaaagtgatgggagaattggtatactggtatgactacgtcttaagtcagatttttatttatgagtctttgagactaaattcaatcaccaccaggtatcaaatcaacttttatgcagcaaatatatgattctagtgtctgacttttgttaaattcagtaatgcagtttttaaaaacctgtatctgacccactttgtaatttttgctccaatatccattctgtagacttttgaaaaaaaagtttttaatttgatgcccaatatattctgaccgttaaaaaattcttgttcatatgggagaagggggagtaatgacttgtacaaacagtatttctggtgtatattttaatgtttttaaaaagagtaatttcatttaaatatctgttattcaaatttgatgatgttaaatgtaatataatgtattttctttttattttgcactctgtaattgcactttttaagtttgaagagccattttggtaaacggtttttattaaagatgctatggaacataaagttgtattgcatgcaatttaaagtaacttatttgactatgaatattatcggattactgaattgtatcaatttgtttgtgttcaatatcagctttgataattgtgtaccttaagatattgaaggagaaaatagataatttacaagatattattaatttttatttatttttcttgggaattgaaaaaaattgaaataaataaaaatgcattgaacatcttgcattcaaaatcttcactgac

SEQ ID NO: 207 - DNA, 425 bp, Homo sapiens
gacatcttcctgcttattagagcatccctagcaacaaggctaaaccttcatgacagtgctggcaggtgggcttgccctagcatgtggggcaggtttgttgtttttttaatagctttattgagatattcacatatcatataattcatccatttaaagtgtataatcagatgggttttggtatattattgatttttaattgtggtgaaatatatatataacaaaatttgctattgtaactatttttaagtataaagttcagtgaggtaggccagcttttatgacgcacctgaagataactttggttttaatcctaccctaaatgaagcatatgcctctatttttcctgtccccagtgctgggcttcgtcacataccaacatttctgggcctttaccaacagcattttagctcagaaggctcgcttac

SEQ ID NO: 208 - DNA, 757 bp, Homo sapiens
  misc_feature (694)..(694): Each "n" represents a nucleotide selected from a, t, g or c, or contains no nucleotide.
tttttgcagcaggaagtggttttattgctgtgaacacagggcaataaagcttggcaaaagttgcagggttagaaatctgaatctttctttgctgtcttccctattcccttctctcgaaaagtacagaactacaaagcagaaaataatcttatttctttttgtctcaactctggtctggcatcctaggcactcgaattctccaaacacctttcttctttcttctacgggaacaagaaaatcaacaaaagaaaagaaaacgtggatgcaattgtaacagaagctatgtcaaatgaaaggaaatgcagtggatgccttagagaatactatctaagtgtacaggaaccaacttgtaggggggatcgctcttctgaggggggtcacaggcaacaatgaagaatttgtactgggcagcagcactatagcggcactggggatactttcctgaagtgagtctgcagtcagtcatgttgacaggctttgagctctggtggcagttgtgctgacgatttttgcagacaatgctgagcaaatcacagacagcagccacattctggaaagagtcatgcagaaaggtattttgatgcttacagtgctgggtataattgttgatgccactcattgccctggtgcattggagaagactttgctgtatatgctgaatttcaaaccagtgaggccttggtgagacgcttanggccaagcatgaatgggacacacttgttccccatagaaccagcagcagtaaaaagaagaggaa

SEQ ID NO: 209 - DNA, 417 bp, Homo sapiens
aaagtgctatctgacgttgttatcctgtttttgcaaaaaaaaaaaaaaaaaaaagttaactacagaccattgtttctaataagcagagagatctattttagtagtaaactgaaggtttagttgtgagcttcagattttgtgaactccagatgttgtgcggtgtttttttttttttttaagacaacaactaaaaaaaatgcaaggaatatgtacactggaactgtagtggtagctttcagtattgtaaagagattgttctatacggacctttttgctgtttatcctgtatgtaataaagtcctttctagatcctatgtgaaaagaaaagtgaagcaactgaatcttcagcatgttctcatcggcggagccttcttgtgtaatgtaaactgtgccatgttattaaaaaatgtgaactaa

SEQ ID NO: 210 - DNA, 1969 bp, Homo sapiens
  misc_feature (57)..(61): Each "n" represents a nucleotide selected from a, t, g or c, or contains no nucleotide.
ccgtccgtccgtcgtcctcctcgcttgcggggcgccgggcccgtcctcgagcccccnnnnnccgtccggccgcgtcggggcctcgccgcgctctacctacctacctggttgatcctgccagtagcatatgcttgtctcaaagattaagccatgcatgtctaagtacgcacggccggtacagtgaaactgcgaatggctcattaaatcagttatggttcctttggtcgctcgctcctctcctacttggataactgtggtaattctagagctaatacatgccgacgggcgctgacccccttcgcgggggggatgcgtgcatttatcagatcaaaaccaacccggtcagcccctctccggccccggccggggggcgggccgcggcggctttggtgactctagataacctcgggccgatcgcacgccccccgtggcggcgacgacccattcgaacgtctgccctatcaactttcgatggtagtcgccgtgcctaccatggtgaccacgggtgacggggaatcagggttcgattccggagagggagcctgagaaacggctaccacatccaaggaaggcagcaggcgcgcaaattacccactcccgacccggggaggtagtgacgaaaaataacaatacaggactctttcgaggccctgtaattggaatgagtccactttaaatcctttaacgaggatccattggagggcaagtctggtgccagcagccgcggtaattccagctccaatagcgtatattaaagttgctgcagttaaaaagctcgtagttggatcttgggagcgggcgggcggtccgccgcgaggcgagccaccgcccgtccccgccccttgcctctcggcgccccctcgatgctcttagctgagtgtcccgcggggcccgaagcgtttactttgaaaaaattagagtgttcaaagcaggcccgagccgcctggataccgcagctaggaataatggaataggaccgcggttctattttgttggttttcggaactgaggccatgattaagagggacggccgggggcattcgtattgcgccgctagaggtgaaattcttggaccggcgcaagacggaccagagcgaaagcatttgccaagaatgttttcattaatcaagaacgaaagtcggaggttcgaagacgatcagataccgtcgtagttccgaccataaacgatgccgaccggcgatgcggcggcgttattcccatgacccgccgggcagcttccgggaaaccaaagtctttgggttccggggggagtatggttgcaaagctgaaacttaaaggaattgacggaagggcaccaccaggagtggagcctgcggcttaatttgactcaacacgggaaacctcacccggcccggacacggacaggattgacagattgatagctctttctcgattccgtgggtggtggtgcatggccgttcttagttggtggagcgatttgtctggttaattccgataacgaacgagactctggcatgctaactagttacgcgacccccgagcggtcggcgtcccccaacttcttagagggacaagtggcgttcagccacccgagattgagcaataacaggtctgtgatgcccttagatgtccggggctgcacgcgcgctacactgactggctcagcgtgtgcctaccctacgccggcaggcgcgggtaacccgttgaaccccattcgtgatggggatcggggattgcaattattccccatgaacgaggaattcccagtaagtgcgggtcataagcttgcgttgattaagtccctgccctttgtacacaccgcccgtcgctactaccgattggatggtttagtgaggccctcggatcggccccgccggggtcggcccacggcctggcggagcgctgagaagacggtcgaacttgactatctagaggaagtaaaagtcgtaacaaggtttccgtaggtgaacctgcggaaggatcatta

SEQ ID NO: 211 - DNA, 344 bp, Homo sapiens
caaaccaagatggtgacaggtacgacctctgttcattctcactgctacactcccaccagctctgcctatggaatagtcattcttttattcctctactttcttaaaaaacttgctttcaccttactctatggactcgccctgaattctttcttgtgcaagatccaagaaccctctcttgggtctggatcgggacctctttcctgtaacactgggaggccaatgtgtgtggatgacatggaattactcaaaatgatctaggttcatttgtttcgacataccttataaagcaagccacagggttgtctgaaggagcctaactggcggtgactgagaagggggctcct

SEQ ID NO: 212 - DNA, 1058 bp, Homo sapiens
gccttgacttcatctcagctccagagcccgccctctcttcctgcagcctgggaacttcagccggctggagcccaccatggctgcaatccgaaagaagctggtgatcgttggggatggtgcctgtgggaagacctgcctcctcatcgtcttcagcaaggatcagtttccggaggtctacgtccctactgtctttgagaactatattgcggacattgaggtggacggcaagcaggtggagctggctctgtgggacacagcagggcaggaagactatgatcgactgcggcctctctcctacccggacactgatgtcatcctcatgtgcttctccatcgacagccctgacagcctggaaaacattcctgagaagtggaccccagaggtgaagcacttctgccccaacgtgcccatcatcctggtggggaataagaaggacctgaggcaagacgagcacaccaggagagagctggccaagatgaagcaggagcccgttcggtctgaggaaggccgggacatggcgaaccggatcagtgcctttggctaccttgagtgctcagccaagaccaaggagggagtgcgggaggtgtttgagatggccactcgggctggcctccaggtccgcaagaacaagcgtcggaggggctgtcccattctctgagatccccccaaagggcccttttcctacatgccccctcccttcacaggggtacagaaattatccccctacaaccccagcctcctgagggctccatactgaaggctccattttcagttccctcctgcccaggactgcattgttttctagccccgaggtgtggcacgggccctccctcccagcgctctgggagccacgcctatgccctgcccttcctcatgggcccctggggatcttgcccctttgaccttccccaaaggatggtcacacaccagcactttatacacttctggctcacaggaaagtgtctgcagtagggacccagagtcccaggcccctggagttgtttctgcaggggccttgtctctcactgcatttggtcaggggggcatgaataaaggct

SEQ ID NO: 213 - DNA, 166 bp, Homo sapiens
aaatgcttcactgtacgtagttaagtcgtagctataacttcaaattttttaaaagagacaaactgtaaaaaatgtgtgtattcttaaaatgcaatatttgtaaggcttgttccaatgccacatacttgcagctcccattctatgtgtcatcaatagtgtcctatgc

SEQ ID NO: 214 - DNA, 634 bp, Homo sapiens
cggctgagaggcagcgaactcatctttgccagtacaggagcttgtgccgtggcccacagcccacagcccacagccatgggctgggacctgacggtgaagatgctggcgggcaacgaattccaggtgtccctgagcagctccatgtcggtgtcagagctgaaggcgcagatcacccagaagattggcgtgcacgccttccagcagcgtctggctgtccacccgagcggtgtggcgctgcaggacagggtcccccttgccagccagggcctgggccctggcagcacggtcctgctggtggtggacaaatgcgacgaacctctgagcatcctggtgaggaataacaagggccgcagcagcacctacgaggtccggctgacgcagaccgtggcccacctgaagcagcaagtgagcgggctggagggtgtgcaggacgacctgttctggctgaccttcgaggggaagcccctggaggaccagctcccgctgggggagtacggcctcaagcccctgagcaccgtgttcatgaatctgcgcctgcggggaggcggcacagagcctggcgggcggagctaagggcctccaccagcatccgagcaggatcaagggccggaaataaaggctgttgtaagagaat

SEQ ID NO: 215 - DNA, 569 bp, Homo sapiens
gagtggcctgaagagtcctctgaatgaaccttctggcctcccacagactcaaatgctcagaccagctcttccgaaaaccaggccttatctccaagaccagagatagtggggagacttcttggcttggtgaggaaaagcggacatcagctggtcaaacaaactctctgaacccctccctccatcgttttcttcactgtcctccaagccagcgggaatggcagctgccacgccgccctaaaagcacactcatcccctcacttgccgcgtcgccctcccaggctctcaacaggggagagtgtggtgtttcctgcaggccaggccagctgcctccgcgtgatcaaagccacactctgggctccagagtggggatgacatgcactcagctcttggctccactgggatgggaggagaggacaagggaaatgtcaggggcggggagggtgacagtggccgcccaaggccacgagcttgttctttgttctttgtcacagggactgaaaacctctcctcatgttctgctttcgattcgttaagagagcaacattttacccacacacagataaagtttt

SEQ ID NO: 216 - DNA, 2087 bp, Homo sapiens
ttattaagaattgcagcaagtaagccaacaaggtcttttcaggatgattttcttatatcaagtggtacatttcattttatttacttcagtttctggtgaatgtgtgactcagttgttgaaggacacctgctttgaaggaggggacattactacggtcttcacaccaagcgccaagtactgccaggtagtctgcacttaccacccaagatgtttactcttcactttcacggcggaatcaccatctgaggatcccacccgatggtttacttgtgtcctgaaagacagtgttacagaaacactgccaagagtgaataggacagcagcgatttctgggtattctttcaagcaatgctcacaccaaataagcgcttgcaacaaagacatttatgtggacctagacatgaagggcataaactataacagctcagttgccaagagtgctcaagaatgccaagaaagatgcacggatgacgtccactgccactttttcacgtacgccacaaggcagtttcccagcctggagcatcgtaacatttgtctactgaagcacacccaaacagggacaccaaccagaataacgaagctcgataaagtggtgtctggattttcactgaaatcctgtgcactttctaatctggcttgtattagggacattttccctaatacggtgtttgcagacagcaacatcgacagtgtcatggctcccgatgcttttgtctgtggccgaatctgcactcatcatcccggttgcttgttttttaccttcttttcccaggaatggcccaaagaatctcaaagaaatctttgtctccttaaaacatctgagagtggattgcccagtacacgcattaaaaagagcaaagctctttctggtttcagtctacaaagctgcaggcacagcatcccagtgttctgccattcttcattttaccatgacactgatttcttgggagaagaactggatattgttgctgcaaaaagtcacgaggcctgccagaaactgtgcaccaatgccgtccgctgccagttttttacctataccccagcccaagcatcctgcaacgaagggaagggcaagtgttacttaaagctttcttcaaacggatctccaactaaaatacttcacgggagaggaggcatctctggatacacattaaggttgtgtaaaatggataatgagtgtaccaccaaaatcaagcccaggatcgttggaggaactgcgtctgttcgtggtgagtggccgtggcaggtgaccctgcacacaacctcacccactcagagacacctgtgtggaggctccatcattggaaaccagtggatattaacagccgctcactgtttctatggggtagagtcacctaagattttgcgtgtctacagtggcattttaaatcaatctgaaataaaagaggacacatctttctttggggttcaagaaataataatccatgatcagtataaaatggcagaaagcgggtatgatattgccttgttgaaactggaaaccacagtgaattacacagattctcaacgacccatatgcctgccttccaaaggagatagaaatgtaatatacactgattgctgggtgactggatgggggtacagaaaactaagagacaaaatacaaaatactctccagaaagccaagatacccttagtgaccaacgaagagtgccagaagagatacagaggacataaaataacccataagatgatctgtgccggctacagggaaggagggaaggacgcttgcaagggagattcgggaggccctctgtcctgcaaacacaatgaggtctggcatctggtaggcatcacgagctggggcgaaggctgtgctcaaagggagcggccaggtgtttacaccaacgtggtcgagtacgtggactggattctggagaaaactcaagcagtgtgaatgggttcccaggggccattggagtccctgaaggacccaggatttgctgggagagggtgttgagttcactgtgccagcatgcttcctccacagtaacacgctgaaggggcttggtgtttgtaagaaaatgctagaagaaaacaaactgtcacaagttgttatgtcc

SEQ ID NO: 217 - DNA, 286 bp, Homo sapiens
  misc_feature (228)..(228): The "n" residue at position 228 is "t" according to UNK_AI687419 gene sequence in the Entrez human genome sequence database.
atcaatacattagatttataggaaacctataatagagatttctttcaaggaactcaggacaccattcaaaaacatagatatggagttgctcttcttgaggagtatctttgtggcattctctgtatttcctgaatttgaatgttggcctgctttgctaggttagggaagttctcctggataatatcctgcagagtgttttccaacttggttccattctccctgtcattntcaggtacaccaatcagacgtagatttggtcttttcccatagtcccatatttcttgga

SEQ ID NO: 218 - DNA, 315 bp, Homo sapiens
ggctactcctacaagagggggaaggatttgaaagaacagcatgatcagaaagtatgtgagagggagatgcagcgaatcactctgcccttgtctgccttcaccaaccccacctgtgagattgtggatgagaagactgtcgtggtccacaccagccagactccagttgaccctcaggagggcaccaccccccttatgggccaggccgggactcctggggcctgagcccccccagtgggcaggagcccatgcagacactggtgcaggacagcccaccctcctacagctaggaggaactaccactttgtgttctggtta

SEQ ID NO: 219 - DNA, 694 bp, Homo sapiens
  misc_feature (390)..(610): The "n" residue at position 390 is "a" according to STK17A gene sequence in the Entrez human genome sequence database.  The "n" at position 610 contains no nucleotide residue according to the same gene sequence.
tgtagttttggcacttttacttggattttttaaagaaagtgaatacaaatatctttgtacacaaattctcattctggagaaacaggatgtagaattcaaaggtgccaacatctcccttcttaaaaataacattgaaacgggtaactgtacctgttaaatatcctggttggcaacttttaaaatctggcttccacctaactccacaaatttgacaaagttatttttgtttgtgtaagtgatactggttatccacttccagtacatgtaccatttggccagaggtccataaataatattaacattttcagtgtagaaatcttgaagttctaaagggaaatattgctcagtagataaattctcctggaatttcttgtagcaaaggttcctcanatttaaatcgtttggaaatggccttttgctccattttctctttttcagactgtctgcattgtcctagagtatatgaagtaactacaattaactcttcggttacaatggattcctcggtttctgatttgtcggtatccgaattaatttcaggcacagaatgaccttctgggagggcatttgcttcttctagtgccttttccatcctgaaagaaggctcttngatactgctctgtgtcaaccaggggtgctttagacattcttcagcagtggcttcgatctcaggtttcttaactaaaagtgtcct

SEQ ID NO: 220 - DNA, 1070 bp, Homo sapiens
ggggtggcgcccggagctgcacggagagcgtgcccgtcagtgaccgaagaagagaccaagatgaatgcagagcccgagaggaagtttggcgtggtggtggttggtgttggccgagccggctccgtgcggatgagggacttgcggaatccacacccttcctcagcgttcctgaacctgattggcttcgtgtcgagaagggagctcgggagcattgatggagtccagcagatttctttggaggatgctctttccagccaagaggtggaggtcgcctatatctgcagtgagagctccagccatgaggactacatcaggcagttccttaatgctggcaagcacgtccttgtggaataccccatgacactgtcattggcggccgctcaggaactgtgggagctggctgagcagaaaggaaaagtcttgcacgaggagcatgttgaactcttgatggaggaattcgctttcctgaaaaaagaagtggtggggaaagacctgctgaaagggtcgctcctcttcacatctgacccgttggaagaagaccggtttggcttccctgcattcagcggcatctctcgactgacctggctggtctccctctttggggagctttctcttgtgtctgccactttggaagagcgaaaggaagatcagtatatgaaaatgacagtgtgtctggagacagagaagaaaagtccactgtcatggattgaagaaaaaggacctggtctaaaacgaaacagatatttaagcttccatttcaagtctgggtccttggagaatgtgccaaatgtaggagtgaataagaacatatttctgaaagatcaaaatatatttgtccagaaactcttgggccagttctctgagaaggaactggctgctgaaaagaaacgcatcctgcactgcctggggcttgcagaagaaatccagaaatattgctgttcaaggaagtaagaggaggaggtgatgtagcacttccaagatggcaccagcatttggttcttctcaagagttgaccattatctctattcttaaaattaaacatgttggggaaacaaaaaaaaaaaaaaaaa

SEQ ID NO: 221 - DNA, 1447 bp, Homo sapiens
gaggcagcagcagcaggaggaggcagacacagcatcgtcgggaccagactcgtctcaggccagttgcagccttctcagccaaacgccgaccaaggaaaactcactaccatgagaattgcagtgatttgcttttgcctcctaggcatcacctgtgccataccagttaaacaggctgattctggaagttctgaggaaaagcagctttacaacaaatacccagatgctgtggccacatggctaaaccctgacccatctcagaagcagaatctcctagccccacagacccttccaagtaagtccaacgaaagccatgaccacatggatgatatggatgatgaagatgatgatgaccatgtggacagccaggactccattgactcgaacgactctgatgatgtagatgacactgatgattctcaccagtctgatgagtctcaccattctgatgaatctgatgaactggtcactgattttcccacggacctgccagcaaccgaagttttcactccagttgtccccacagtagacacatatgatggccgaggtgatagtgtggtttatggactgaggtcaaaatctaagaagtttcgcagacctgacatccagtaccctgatgctacagacgaggacatcacctcacacatggaaagcgaggagttgaatggtgcatacaaggccatccccgttgcccaggacctgaacgcgccttctgattgggacagccgtgggaaggacagttatgaaacgagtcagctggatgaccagagtgctgaaacccacagccacaagcagtccagattatataagcggaaagccaatgatgagagcaatgagcattccgatgtgattgatagtcaggaactttccaaagtcagccgtgaattccacagccatgaatttcacagccatgaagatatgctggttgtagaccccaaaagtaaggaagaagataaacacctgaaatttcgtatttctcatgaattagatagtgcatcttctgaggtcaattaaaaggagaaaaaatacaatttctcactttgcatttagtcaaaagaaaaaatgctttatagcaaaatgaaagagaacatgaaatgcttctttctcagtttattggttgaatgtgtatctatttgagtctggaaataactaatgtgtttgataattagtttagtttgtggcttcatggaaactccctgtaaactaaaagcttcagggttatgtctatgttcattctatagaagaaatgcaaactatcactgtattttaatatttgttattctctcatgaatagaaatttatgtagaagcaaacaaaatacttttacccacttaaaaagagaatataacattttatgtcactataatcttttgttttttaagttagtgtatattttgttgtgattatctttttgtggtgtgaataaatcttttatcttgaatgtaataag

SEQ ID NO: 222 - DNA, 2088 bp, Homo sapiens
catgaaggaccgaacccaggagctccgcacggccaaggacagcgatgatgatgatgatgtcgctgtcaccgtggaccgagaccgcttcatggatgagttctttgagcaggtggaggagattcgaggcttcattgacaagatcgcagagaacgtggaggaggtgaagcggaagcacagtgccatcctggcatcccccaaccccgatgagaagacgaaggaggagctggaagaactcatgtccgacataaagaagacagcaaacaaagttcgttccaagttaaagagcatcgagcagtccatcgagcaagaggaaggcctgaaccgctcctccgctgacctgaggatccggaagacacagcactccacgctgtccagaaagtttgtggaggtcatgtcggagtacaacgccacgcagtccgactaccgcgagcgctgcaaaggccgcatccagaggcagctggagatcaccggcaggaccacgaccagtgaggagctggaggacatgctggagagtgggaaccccgccatctttgcctctgggatcatcatggactccagcatctcgaagcaggctctgagcgagattgagacgcggcacagtgagatcatcaagctggagaacagcatccgtgagctacacgacatgttcatggacatggccatgctcgtggagagccagggagagatgattgacaggatcgagtacaatgtggaacacgcggtagactatgtggagagggccgtgtctgacaccaagaaggccgtcaagtaccagagcaaggcgcgccggaagaaaatcatgatcatcatctgctgtgtgatcctgggcatcgtcatcgcctccactgttgggggcatcttcgcctagaagccacccaaactgccactccactccaggtgggccactccaaggaggccctggctgctgccacctggctgggctgccctcccaacccccgcctctggctcagagcaccctccctcccggcccccatgctcccttctctgccatgggccctccgtccccgccccgtgtcgtgtgcatgatctctgtgagtgtgcgtctgtacgggaagaggcagagggaggcagccagcggggcgtgatgcagtgtgcacagcgaggagcagacccaggcagggccgccagggtgacacaggccacgcttccttgccttcagtaactcggtgggcccaggttctgctcttccctggggaccctaacctcgcctccagctgacctgccctgtcctctccagctgtccccacaagcagagccctgaggggtggggaccagctggccacatggtgctgcttttcaggttaggggagaggtgaccctgagggacagcccagctctgagtctcagtcgctgatcactgccagggaggctcaggctgccatggctccaggctccctcccctgcctaggggcaaagtccatcgggtcctgggcctcagcttcccttcccacattcctccggccccaggagcaaccccttgggctaggtctgaccccaggtgtccctctggaaggggctggctggtgccctatttccagccaccccagcagctagggaggcaaagcaggctgcagtcagtccctcaagccagcgttgcatgtttgggatggtggctcctgttgtcttgcgctctgggaagtcagatgtcatttcaggcctgcagtctcatcctgcccttgccatcctcccatcgatgtgccacgtgggtgtcacgtgtcccagatgcagtattcggcagccagccggggagggctacctcctcctcctcaccaccttggggcttctcatgggaaatgtgcccccgccccaggaccctctcccttgtggacaggcagggagatgcatgcgagtgcatgcagcaggggatggggccgtgtccgtgtgccccaccctccctcggctttactcctgcccagtgactgtgaccactgtccgtgttgccttcttgaacagcgattccccccaaccccttcaccaaaggtcttggtacaaccagctgcccattttgtgaaatttttatgtagaataaacatttgtatctgtaaaaaaaaaaaaaaaaaagcgttc

SEQ ID NO: 223 - DNA, 2418 bp, Homo sapiens
gcttctatgaggagaccatgtgccgaggtcgtgtgctaggaagccagttgctgtgagaaatgaccagtgtcatgtctgtctttcagccaccctacatcatgtagcagttcttctgagatcatgtctgtgctgttcttctacatcatgaggtacaagcagtcagatccagagaatccggacaacgaccgatttgtcctcgcaaagagactgtcgtttgtggatgtggcaacaggatggctcggacaaggactgggagttgcatgtggaatggcatatactggcaagtacttcgacagggccagctaccgggtgttctgcctcatgagtgatggcgagtcctcagaaggctctgtctgggaggcaatggcctttgcttcctactacagtctggacaatcttgtggcaatctttgatgtgaaccgcctgggacacagtggtgcattgcccgccgagcactgcataaacatctatcagaggcgctgcgaagcctttgggtggaacacttatgtggtggacggccgggacgtggaggcactgtgccaggtattctggcaggcttctcaggtgaagcacaagcccactgctgtggtggccaagaccttcaagggccggggcaccccaagtattgaggatgcagaaagttggcatgcaaagccaatgccgagagaaagagcagatgccattatcaaattaattgagagccagatacagaccagcaggaatcttgacccacagccccccattgaggactcacctgaagtcaacatcacagatgtaaggatgacctctccacctgattacagagttggtgacaagatagctactcggaaagcatgcggtctggctctggctaagctgggctacgcgaacaacagagtcgttgtgctggatggtgacaccaggtactctactttctctgagatattcaacaaggagtaccctgagcgcttcatcgagtgctttatggctgaacaaaacatggtgagcgtggctctgggctgtgcctcccgtggacggaccattgcttttgctagcacctttgctgcctttctgactcgagcatttgatcacatccggataggaggcctcgctgagagcaacatcaacattattggttcccactgtggggtatctgttggtgacgatggtgcttcccagatggccctggaggatatagccatgttccgaaccattcccaagtgcacgatcttctacccaactgatgccgtctccacggagcatgctgttgctctggcagccaatgccaaggggatgtgcttcattcggaccacccgaccagaaactatggttatttacaccccacaagaacgctttgagatcggacaggccaaggtcctccgccactgtgtcagtgacaaggtcacagttattggagctggaattactgtgtatgaagccttagcagctgctgatgagctttcgaaacaagatatttttatccgtgtcatcgacctgtttaccattaaacctctggatgtcgccaccatcgtctccagtgcaaaagccacagagggccggatcattacagtggaggatcactacccgcaaggtggcatcggggaagctgtctgcgcagccgtctccatggatcctgacattcaggttcattcgctggcagtgtcgggagtgccccagagtgggaagtccgaggaattgctggatatgtatggaattagtgccagacatatcatagtggccgtgaaatgcatgttgctgaactaaaatagctgttagccttggtcttttggcctctttaccctgtgtttatgtttgttccaaaaccatcatttaaatctctactgtcacattttgtttcttaaaagcaaagccagctaacaccttcattcatccctagttcggaaattcaagctaactacttaccctttaaactgtcactgcatatgcaagtaccgctctaatttttggatcattaaagggagttacacaacttttaagtgaaaaaaataggtaacaaaacaaccacctgatagtaagttttctgataagactatagataagtggtagaggtaatcaattcttccgaagtgtttccttcgtgaataactggtagaggtaatagttttttcaatgtatttccttcatgagtaaagaaaatgtggattgaagtatagattccagtagcctagtttccacagcacgataacaccatgacgcctactgctgttcccaccttgggattctgtgtgctgccatcccacctgcagctgccctggaattcccttcgctgtttgccttcatctccctccacgtttgagaggctgtcaggcagcagcgaaagcttgttaggatgtcctgtgctgcttgtgatgagagcctccacactgtactgttcaagtcaatgttaataaagcatttcaaaaccaaaaaaaaaaaaaa

SEQ ID NO: 224 - DNA, 1223 bp, Homo sapiens
acactcgctcggctcaccatgtgtcactctcgcagctgccacccgaccatgaccatcctgcaggccccgaccccggccccctccaccatcccgggaccccggcggggctccggtcctgagatcttcaccttcgaccctctcccggagcccgcagcggcccctgccgggcgccccagcggctctcgcgggcaccgaaagcgcagccgcagggttctctaccctcgagtggtccggcgccagctgccagtcgaggaaccgaacccagccaaaaggcttctctttctgctgctcaccatcgtcttctgccagatcctgatggctgaagagggtgtgcgggcgcccctgcctccagaggacgcccctaacgccgcatccctggcgcccacccctgtgtcccccgtcctcgagccctttaatctgacttcggagccctcggactacgctctggacctcagcactttcctccagcaacacccggccgccttctaactgtgactccccgcactccccaaaaagaatccgaaaaaccacaaagaaacaccaggcgtacctggtgcgcgagagcgtatccccaactgggacttccgaggcaacttgaactcagaacactacagcggagacgccacccggtgcttgaggcgggaccgaggcgcacagagaccgaggcgcatagagaccgagcacagcccagctgggctaggcccggtgggaaggagagcgtcgttaatttatttcttattgctcctaattaatatttatatgtatttatgtacgtcctcctaggtgatgagatgtgtacgtaatatttattttaacttatgcaagggtgtgagatgttccccctgctgtaaatgcaggtctcttggtatttattgagctttgtgggactggtggaagcaggacacctggaactgcggcaaagtaggagaagaaatggggaggactcgggtgggggaggacgtcccggctgggatgaagtctggtggtgggtcgtaagtttaggaggtgactgcatcctccagcattctcaactccgtctgtctactgtgtgagacttcggcggaccattaggaatgagatccgtgagatccttccatcttcttgaagtcgcctttagggtggctgcgaggtagagggttgggggttggtgggctgtcacggagcgactgtcgagatcgcctagtatgttctgtgaacacaaataaaattgatttactgtctgc

SEQ ID NO: 225 - DNA, 7258 bp, Homo sapiens
ttcaataggaagcaccaacagtttatgccctaggactttgttcccacaatcctgtaacatcatatcacgacacctaacccaatccttatcaagccctgtcaaaaacggactttaaaccaagctgcaaattttcagtaatctggccttgcctttccccctctgatagcaccatcaaacaaacccccttactgccgaaagcaataagcccggctttgttccatccactggttgtgttggtgatatctggggactgccactgaacagacgcacagagggagcccctacaggcaggggtttttctgtctgtgcttcttgggagagtatgtctcgtacatttgtcgcgtgatgaagacttcacagctccatccagcgaccagactcacagctccatccagctgcggcaagggggtctgaggcagtcttaggcaagttggggcccagcgggagaagttgcagaagaactgattagaggacccaggaggcttcagagctgggctgaggtagagagtctcctgtgcgccttctctcctctctgcaattcggggactccttgcactggggcaggccccggcaggtgcatgggaggaagcacggagaatttacaagcctctcgattcctcagtccagacgctgttgggtcccctccgctggagatcgcgcttcccccaaatctttgtgagcgttgcggaagcacgcggggtccgggtcgctgagcgctgcaagacaggggagggagccgggcgggagagggaggggcggcgccggggcgggccctgatatagagcaggcgccgcgggtcgcagcacagtcggagaccgcagcccggagcccgggccagggtccacctgtccccgcagcgccggctcgcgccctcctgccgcagccaccggtgagtgccgcggtcctgagatccccgggccggatgcgcggcggccccagctcccgagcgtctgcctgccccgccctgggctgcccgggctccctgggctccccggcggctgcacggagtcaaggcgccccgtcccgggcgtcccccgcgggtgccgatccaggctgcccggagtccggagcccatagaggagagagacagctggggagcctggtcaccgcgggcatctcccctgcgctgcagtcgcccgcctggcctgccttcccgttcctccgcctcttgccctgacttctccttcctttgcagagccgccgtctagcgccccgacctcgccaccatgagagccctgctggcgcgcctgcttctctgcgtcctggtcgtgagcgactccaaagtgagtgcgctcttgctttgactgatgctgcccaaggacctctgatcagcaccaggggagaggaggggctgctcagggagctggggtctccggattccatccacagcagggccagactctccccaggaaatgggacagggtggcagcggaggcttgagaaccacgggggttggcactggctggcaagggaggaagagggccaccgggactgccccagcctgcgggcatctggtagatgaagcttaatccatttctcctggctggaaaccatggtcttccatttgagaactagatacgaacagggtgaggcgagagggagagggaagagtgggttttgggattggggccagtttaccctcaccctggatccctggagcatgggacctttgatgaagcctcctcccgaatctcttccagggcagcaatgaacttcatcaagttccatgtgagtatccacccctacaacagttggctgcacagacaagttgggaaggcttcaggggacactcccctccctgccctctgctgcagcgtgcgccaccccttaccacttccactccccctcgcttaccccacctttgttctctccagcgaactgtgactgtctaaatggaggaacatgtgtgtccaacaagtacttctccaacattcactggtgcaactgcccaaagaaattcggagggcagcactgtgaaataggtatggggatctccactgcaactgggagagaaatttggggacagggagggatgggtgggaggcaagagcaggcaggagttaggagctggaggtagggtgggtgacatcttcatccctatgtgacaagcataaacacacacacacgctcacgaaacagtggccacacaaatgtgaggtggggttggaaggagaccctgtccagtcttctggcaggtctgaaacgacatctttaaaatgtccgttggcagccgggcatggtggctcacgcttgtaatcccagcattttgagaggtcaagtttgagtggatcatttaggtcaggagttcaagaccagcctggacaacatggtgtaaccctgcctctactaaaaatgcaaaaatcagcctggcatggtggtggatgcctgtagtcccagctacttgggaggctgaggcaggagaattgcttgaacatgggaggccagatctcagtgagctgagatcacaccactgcactccaactgggcgacagagcaagactccatctcaaaaaaaaaaaaaaataaaagttagttggaatgttcttctctttctcatattctctcatcctcctgtccccttgtagataagtcaaaaacctgctatgaggggaatggtcacttttaccgaggaaaggccagcactgacaccatgggccggccctgcctgccctggaactctgccactgtccttcagcaaacgtaccatgcccacagatctgatgctcttcagctgggcctggggaaacataattactgcaggtgaggtgggggcaacaaggaccaaaagccctccctacagcttcccagaaaccttgttaccatccccttctcccagagggctggccatagcacaagagaagtgcggcctctggttgagtcttccctgaggggaggaggcagggaaggccctctgggttggaatgacatcccctatctttctgtgttgtgccaggaacccagacaaccggaggcgaccctggtgctatgtgcaggtgggcctaaagccgcttgtccaagagtgcatggtgcatgactgcgcagatggtgagcatcactgacctgctgatgacaggtgggtggaaggggacaaacttacatgtccccttattccatcacaggaggactgaggaggtggggggtgcccgagagggatgctttctcctacctgcctccctaagacatccctctgtttgtcctccaggaaaaaagccctcctctcctccagaagaattaaaatttcagtgtggccaaaagactctgaggccccgctttaagattattgggggagaattcaccaccatcgagaaccagccctggtttgcggccatctacaggaggcaccgggggggctctgtcacctacgtgtgtggaggcagcctcatgagcccttgctgggtgatcagcgccacacactgcttcatgtacggccctgggtttctcctcttcgactcttctgccccaccccaagcacatccctttctccttcccagcaaagtgttccgcctcatttctccctcatctgcccctgtccatgcgcccatggccttggggacaagtcgtgctttgaggcctctagggagggaaggaagaagtggcatgatttcatgggactaagctgtttgatgggtatcttcttccacagtgattacccaaagaaggaggactacatcgtctacctgggtcgctcaaggcttaactccaacacgcaaggggagatgaagtttgaggtggaaaacctcatcctacacaaggactacagcgctgacacgcttgctcaccacaacgacattggtgagggggaacgcccgcgactactgtggccataatggcttggggagagtgggacccagggagagactggagctgagttgaagctgccggtggggcaggggtggggcgagggaccttgaagcctcgatatacatgacaaaggatggcagggaagagttccatgaagtctgaggggcctggtgctcctctggagagaccctgaatttccccaacaagtagccctcttgcgagtggaaacagccctgtgggtatatggcttgggctgggaaggccctgtttatatgaattagaaaaagacacaccttcctttgtgggatgcagcctctgtctgtgctaggatatagaacttggagaatggagccttgggatggattccagcctaactacctcagggggatcctctagagtgcagctgggagtttttgcagaaacgacctgtacagctgtatgcagtggctctggccatccaagcctttttcaacacctggaacaaagcccttggggcatggggcaggggaggtttccaggtgataagcgaccagcagacctccctggatgactgacctagggataggcatagctacttcctcggcacttggaggggacagatggggaccgcctaaccagtagtgatctttctcctctgaccctctgtcctcccccagccttgctgaagatccgttccaaggagggcaggtgtgcgcagccatcccggactatacagaccatctgcctgccctcgatgtataacgatccccagtttggcacaagctgtgagatcactggctttggaaaagagaattctagtaagtgacaattgcgactgacttagaaggtcctgaggagtgttttgacctgaaaatgagcccagtgtgatcaagggaagactgcagagttagaggtgggagcactgaggcggtggcagatgggtccagggatggatgaagagtgttgtttagggagcgatgggctgcaaaggtaaatagatggtaggggctataggtggaggtaaatggctcagatttgcatggagagagaataatgggcctctccctgggtgatgatactttatggtgtcccctctctggcgagacgtcccacgtggaggcagataaatcttgatgcaaacgcctccctgttttctccacctagccgactatctctatccggagcagctgaaaatgactgttgtgaagctgatttcccaccgggagtgtcagcagccccactactacggctctgaagtcaccaccaaaatgctgtgtgctgctgacccacagtggaaaacagattcctgccaggtgagtgttccaagcatctctctccacctcttccatatctccccagagctcctgggcttgttccagccagcttaagggtgtctctctctagccaaagccctaagtagccagaatcaggagctcaggtctttgagggtttaaaccagtccttatgtgtttgccagacattaccaaaaaaatcccagctctgcgctagtcacttcagactgggggcacgagatcctagaaagaggaaacagtaaaagacaatgtaactcagtgcccagggtgtgttgtgaactataaatgatcaggtgttcaggagagggaggtgagtgccaacctgagggtcagggaggggaggctttaaaggaaatgtgacttgataggcatttgaagaggcagagggaagaaaggaaggtgtttcagttgaaagatacaaaactgagaaggaggctggcatattccgggtggggaggagaactagggtctgggagtgtggatggaatagtggcagatgacagggcttttaaagccaagcaggggattttccaacttcgatgtggtagaaatggggctgcgtcaggcacagtggctcatgcctgtaatcccagcattgggctaggccgtagtcgatggatcattgaggccagagttgagaccggcctggaccaacatggtgaaaccctgtgtctactaaaaaatgcaaaaaaaaaaattagccaggtgtggtggtgcctgcctgtaatcccagctaatcaggaggctgagacatggaatcgcttgagcacaggaggcaagtttgacgtgagctgagatcacgtcattgcacgccagcctgggcgacagagcgagattctgtcctcccgccgaaaaaagaaagaaaatgggaagtcgctaaggactttgactgggaaactcttccctctctctggtatggttgggtgatgggatcagaaatcccctcctcacttctctagggctcatcttttgtatctttggcgtcacagggagactcagggggacccctcgtctgttccctccaaggccgcatgactttgactggaattgtgagctggggccgtggatgtgccctgaaggacaagccaggcgtctacacgagagtctcacacttcttaccctggatccgcagtcacaccaaggaagagaatggcctggccctctgagggtccccagggaggaaacgggcaccacccgctttcttgctggttgtcatttttgcagtagagtcatctccatcagctgtaagaagagactgggaagataggctctgcacagatggatttgcctgtgccacccaccagggtgaacgacaatagctttaccctcaggcataggcctgggtgctggctgcccagacccctctggccaggatggaggggtggtcctgactcaacatgttactgaccagcaacttgtctttttctggactgaagcctgcaggagttaaaaagggcagggcatctcctgtgcatgggtgaagggagagccagctcccccgacggtgggcatttgtgaggcccatggttgagaaatgaataatttcccaattaggaagtgtaacagctgaggtctcttgagggagcttagccaatgtgggagcagcggtttggggagcagagacactaacgacttcagggcagggctctgatattccatgaatgtatcaggaaatatatatgtgtgtgtatgtttgcacacttgtgtgtgggctgtgagtgtaagtgtgagtaagagctggtgtctgattgttaagtctaaatatttccttaaactgtgtggactgtgatgccacacagagtggtctttctggagaggttataggtcactcctggggcctcttgggtcccccacgtgacagtgcctgggaatgtacttattctgcagcatgacctgtgaccagcactgtctcagtttcactttcacatagatgtccctttcttggccagttatcccttccttttagcctagttcatccaatcctcactgggtggggtgaggaccactccttacactgaatatttatatttcactatttttatttatatttttgtaattttaaataaaagtgatcaataaaatgtgatttttctgatgacaaatctccctggtgcttgtatgggaaggagttggagtacataaaaaggagaaaataacaaaggtgg

SEQ ID NO: 226 - DNA, 1560 bp, Homo sapiens
cgagcccgagtggttcactgcactgtgaaaacagattccagacgccgggaactcacgcctccaatcccagacgctatgtccagcaaaggctccgtggttctggcctacagtggcggcctggacacctcgtgcatcctcgtgtggctgaaggaacaaggctatgacgtcattgcctatctggccaacattggccagaaggaagacttcgaggaagccaggaagaaggcactgaagcttggggccaaaaaggtgttcattgaggatgtcagcagggagtttgtggaggagttcatctggccggccatccagtccagcgcactgtatgaggaccgctacctcctgggcacctctcttgccaggccctgcatcgcccgcaaacaagtggaaatcgcccagcgggagggggccaagtatgtgtcccacggcgccacaggaaaggggaacgatcaggtccggtttgagctcagctgctactcactggccccccagataaaggtcattgctccctggaggatgcctgaattctacaaccggttcaagggccgcaatgacctgatggagtacgcaaagcaacacgggattcccatcccggtcactcccaagaacccgtggagcatggatgagaacctcatgcacatcagctacgaggctggaatcctggagaaccccaagaaccaagcgcctccaggtctctacacgaagacccaggacccagccaaagcccccaacacccctgacattctcgagatcgagttcaaaaaaggggtccctgtgaaggtgaccaacgtcaaggatggcaccacccaccagacctccttggagctcttcatgtacctgaacgaagtcgcgggcaagcatggcgtgggccgtattgacatcgtggagaaccgcttcattggaatgaagtcccgaggtatctacgagaccccagcaggcaccatcctttaccatgctcatttagacatcgaggccttcaccatggaccgggaagtgcgcaaaatcaaacaaggcctgggcttgaaatttgctgagctggtgtataccggtttacggcctagccctgagtgtgaatttgtccgccactgcatcgccaagtcccaggagcgagtggaagggaaagtgcaggtgtccgtcctcaagggccaggtgtacatcctcggccgggagtccccactgtctctctacaatgaggagctggtgagcatgaacgtgcagggtgattatgagccaactgatgccaccgggttcatcaacatcaattccctcaggctgaaggaatatcatcgtctccagagcaaggtcactgccaaatagacccgtgtacaatgaggagctggggcctcctcaatttgcagatcccccaagtacaggcgctaattgttgtgataatttgtaattgtgacttgttctccccggctggcagcgtagtggggctgccaggccccagctttgttccctggtccccctgaagcctgcaaacgttgtcatcgaagggaagggtggggggcagctgcggtggggagctataaaaatgacaattaaaagagaaaaaaaaaaaaa

SEQ ID NO: 227 - DNA, 1227 bp, Homo sapiens
caggcctcctggcagcacctgcgcagtgaacaggctggctgaggtgcacgggagcccgcccgcctctctctgcccgtgtcagtccgtgaaattccggccggggctccctgagatggccctcctgacagctttggacgacaccctccccgaggaagcccagggaccgggaaggcgaatgatactcctttcgaccccgagtcaaagtgatgccctgcgagcctgctttgagcggaacctgtacccgggcattgccaccaaagaagagctggcccagggcatcgacattccggagcccagggtccagatttggtttcagaatgagagatcatgccagttgaggcagcaccggcggcaatctcggccctggcccgggagacgtgacccgcaaaaaggcagacgaaagcggactgccatcaccggatcccaaaccgccctgctcctccgagcctttgagaaggatcgctttccaggcattgctgccagggaagagctggccagagagacgggcctcccggagtccaggattcagatctggtttcagaatcgaagagccaggcaccggggacagtctggcagggcgcccacgcaggcaagcatccggtgcaatgcagccccaattgggtgacaccctgctctctcgtgggtcgcctttgcccacactggcgcatggggaaaggggcttcctgcaccacacatgctctcccacagtgggctttcgtgagccatggattgagggccgtccctgtgctcctgcccagccaggccgcgcaggcagaagggatctcccaacctgccccagcacatggggattttgcctacaccgcccaggctcctccagaaggggcgctctcccacactcacactcctaggtggcatccacacaagggcaaaatccggaaggactgggacgcgcagcgcgacggccttccgggcacttgcgcggtgggacagcctgggccctctcaagcggggccacagggccaaggtgtgcttgcgccacccgcgtcccagggaagtccgtggtgggggtggagcaggggtacccaggtcgccggtgtggcgtggaacctcaagcaggggcaattccacctcaccagcccacgcccccagaggcctccacacggcaggggcagatgcaaggcatctcagcaccctcccaggcgctcctggagccagggtgctcgtctgcactccactccatcctgctgctggatgagctcctggcga

SEQ ID NO: 228 - DNA, 2793 bp, Homo sapiens
ctacccctttgtgagcagtctaggactttgtacacctgttaagtagggagaaggcaggggaggtggctggtttaaggggaacttgagggaagtagggaagactcctcttgggacctttggagtaggtgacacatgagcccagccccagctcacctgccaatccagctgaggagctcacctgccaatccagctgaggctgggcagaggtgggtgagaagagggaaaattgcagggacctccagttgggccaggccagaagctgctgtagctttaaccagacagctcagacctgtctggaggctgccagtgacaggttaggtttagggcagagaagaagcaagaccatggtggggaagatgtggcctgtgttgtggacactctgtgcagtcagggtgaccgtcgatgccatctctgtggaaactccgcaggacgttcttcgggcttcgcagggaaagagtgtcaccctgccctgcacctaccacacttccacctccagtcgagagggacttattcaatgggataagctcctcctcactcatacggaaagggtggtcatctggccgttttcaaacaaaaactacatccatggtgagctttataagaatcgcgtcagcatatccaacaatgctgagcagtccgatgcctccatcaccattgatcagctgaccatggctgacaacggcacctacgagtgttctgtctcgctgatgtcagacctggagggcaacaccaagtcacgtgtccgcctgttggtcctcgtgccaccctccaaaccagaatgcggcatcgagggagagaccataattgggaacaacatccagctgacctgccaatcaaaggagggctcaccaacccctcagtacagctggaagaggtacaacatcctgaatcaggagcagcccctggcccagccagcctcaggtcagcctgtctccctgaagaatatctccacagacacatcgggttactacatctgtacctccagcaatgaggaggggacgcagttctgcaacatcacggtggccgtcagatctccctccatgaacgtggccctgtatgtgggcatcgcggtgggcgtggttgcagccctcattatcattggcatcatcatctactgctgctgctgccgagggaaggacgacaacactgaagacaaggaggatgcaaggccgaaccgggaagcctatgaggagccaccagagcagctaagagaactttccagagagagggaggaggaggatgactacaggcaagaagagcagaggagcactgggcgtgaatccccggaccacctcgaccagtgacaggccagcagcagagggcggcggaggaagggttaggggttcattctcccgcttcctggcctcccttctcctttctaagccctgttctcctgtccctccatcccagacattgatggggacatttcttccccagtgtcagctgtggggaacatggctggcctggtaagggggtccctgtgctgatcctgctgacctcactgtcctgtgaagtaacccctcctggctgtgacacctggtgcgggcctggccctcactcaagaccaggctgcagcctccacttccctcgtagttggcaggagctcctggaagcacagcgctgagcatggggcgctcccactcagaactctccagggaggcgatgccagccttggggggtgggggctgtcctgctcacctgtgtgcccagcacctggaggggcaccaggtggagggtttgcactccacacatctttcttgaatgaatgaaagaataagtgagtatgcttgggccctgcattggcctggcctccagctcccactccctttccaacctcacttcccgtagctgccagtatgttccaaaccctcctgggaaggccacctcccactcctgctgcacaggccctggggagcttttgcccacacactttccatctctgcctgtcaatatcgtacctgtccctccaggcccatctcaaatcacaaggatttctctaaccctatcctaattgtccacatacgtggaaacaatcctgttactctgtcccacgtccaatcatgggccacaaggcacagtcttctgagcgagtgctctcactgtattagagcgccagctccttggggcagggcctgggcctcatggcttttgctttccctgaagccctagtagctggcgcccatcctagtgggcacttaagcttaattggggaaactgctttgattggttgtgccttcccttctctggtctccttgagatgatcgtagacacagggatgattcccacccaaacccacgtattcattcagtgagttaaacacgaattgatttaaagtgaacacacacaagggagcttgcttgcagatggtctgagttcttgtgtcctggtaattcctctccaggccagaataattggcatgtctcctcaacccacatggggttcctggttgttcctgcatcccgatacctcagccctggccctgcccagcccatttgggctctggttttctggtggggctgtcctgctgccctcccacagcctccttctgtttgtcgagcatttcttctactcttgagagctcaggcagcgttagggctgcttaggtctcatggaccagtggctggtctcacccaactgcagtttactattgctatcttttctggatgatcagaaaaataattccataaatctattgtctacttgcgattttttaaaaaatgtatatttttatatatattgttaaatcctttgcttcattccaaatgctttcagtaataataaaattgtgggtgg

SEQ ID NO: 229 - DNA, 2937 bp, Homo sapiens
gaagggtctgctgtgcaccatcccccatcctacgtggcccacctggcctcagacttcggggtgagggtgtttcagcaggtggcgcaggcctccaaggaccgcaacgtggttttctcaccctatggggtggcctcggtgttggccatgctccagctgacaacaggaggagaaacccagcagcagattcaagcagctatgggattcaagattgatgacaagggcatggcccccgccctccggcatctgtacaaggagctcatggggccatggaacaaggatgagatcagcaccacagacgcgatcttcgtccagcgggatctgaagctggtccagggcttcatgccccacttcttcaggctgttccggagcacggtcaagcaagtggacttttcagaggtggagagagccagattcatcatcaatgactgggtgaagacacacacaaaaggtatgatcagcaacttgcttgggaaaggagccgtggaccagctgacacggctggtgctggtgaatgccctctacttcaacggccagtggaagactcccttccccgactccagcacccaccgccgcctcttccacaaatcagacggcagcactgtctctgtgcccatgatggctcagaccaacaagttcaactatactgagttcaccacgcccgatggccattactacgacatcctggaactgccctaccacggggacaccctcagcatgttcattgctgccccttatgaaaaagaggtgcctctctctgccctcaccaacattctgagtgcccagctcatcagccactggaaaggcaacatgaccaggctgccccgcctcctggttctgcccaagttctccctggagactgaagtcgacctcaggaagcccctagagaacctgggaatgaccgacatgttcagacagtttcaggctgacttcacgagtctttcagaccaagagcctctccacgtcgcgcaggcgctgcagaaagtgaagatcgaggtgaacgagagtggcacggtggcctcctcatccacagctgtcatagtctcagcccgcatggcccccgaggagatcatcatggacagacccttcctctttgtggtccggcacaaccccacaggaacagtccttttcatgggccaagtgatggaaccctgaccctggggaaagacgccttcatctgggacaaaactggagatgcatcgggaaagaagaaactccgaagaaaagaattttagtgttaatgactctttctgaaggaagagaagacatttgccttttgttaaaagatggtaaaccagatctgtctccaagaccttggcctctccttggaggacctttaggtcaaactccctagtctccacctgagaccctgggagagaagtttgaagcacaactcccttaaggtctccaaaccagacggtgacgcctgcgggaccatctggggcacctgcttccacccgtctctctgcccactcgggtctgcagacctggttcccactgaggccctttgcaggacggaactacggggcttacaggagcttttgtgtgcctggtagaaactatttctgttccagtcacattgccatcactcttgtactgcctgccaccgcggaggaggctggtgacaggccaaaggccagtggaagaaacaccctttcatctcagagtccactgtggcactggccacccctccccagtacaggggtgctgcaggtggcagagtgaatgtcccccatcatgtggcccaactctcctggcctggccatctccctccccagaaacagtgtgcatgggttattttggagtgtaggtgacttgtttactcattgaagcagatttctgcttccttttatttttataggaatagaggaagaaaggtcagatgcgtgcccagctcttcaccccccaatctcttggtggggaggggtgtacctaaatatttatcatatccttgcccttgagtgcttgttagagagaaagagaactactaaggaaaataatattatttaaactcgctcctagtgtttctttgtggtctgtgtcaccgtatctcaggaagtccagccacttgactggcacacacccctccggacatccagcgtgacggagcccacactgccaccttgtggccgcctgagaccctcgcgccccccgcgccccccgcgcccctctttttccccttgatggaaattgaccatacaatttcatcctccttcaggggatcaaaaggacggagtggggggacagagactcagatgaggacagagtggtttccaatgtgttcaatagatttaggagcagaaatgcaaggggctgcatgacctaccaggacagaactttccccaattacagggtgactcacagccgcattggtgactcacttcaatgtgtcatttccggctgctgtgtgtgagcagtggacacgtgaggggggggtgggtgagagagacaggcagctcggattcaactaccttagataatatttctgaaaacctaccagccagagggtagggcacaaagatggatgtaatgcactttgggaggccaaggcaggaggattgcttgagcccaggagttcaagaccagcctgggcaacataccaagacccccgtctctttaaaaatatatatattttaaatatacttaaatatatatttctaatatctttaaatatatatatatattttaaagaccaatttatgggagaattgcacacagatgtgaaatgaatgtaatctaatagaagcctaatcagcccaccatgttctccactgaaaaatcctctttctttggggtttttctttctttcttttttgattttgcactggacggtgacgtcagccatgtacaggatccacaggggtggtgtcaaatgctattgaaattgtgttgaattgtatgctttttcacttttgataaataaacatgtaaaaatgtttc

SEQ ID NO: 230 - DNA, 5102 bp, Homo sapiens
gcttctgcgactccagttgtgagagccgcaagggcatgggaattgacgccactcaccgacccccagtctcaatctcaacgctgtgaggaaacctcgactttgccaggtccccaagggcagcggggctcggcgagcgaggcacccttctccgtccccatcccaatccaagcgctcctggcactgacgacgccaagagactcgagtgggagttaaagcttccagtgagggcagcaggtgtccaggccgggcctgcgggttcctgttgacgtcttgccctaggcaaaggtcccagttccttctcggagccggctgtcccgcgccactggaaaccgcacctccccgcagcatgggcaccagcctcagcccgaacgacccttggccgctaaacccgctgtccatccagcagaccacgctcctgctactcctgtcggtgctggccactgtgcatgtgggccagcggctgctgaggcaacggaggcggcagctccggtccgcgcccccgggcccgtttgcgtggccactgatcggaaacgcggcggcggtgggccaggcggctcacctctcgttcgctcgcctggcgcggcgctacggcgacgttttccagatccgcctgggcagctgccccatagtggtgctgaatggcgagcgcgccatccaccaggccctggtgcagcagggctcggccttcgccgaccggccggccttcgcctccttccgtgtggtgtccggcggccgcagcatggctttcggccactactcggagcactggaaggtgcagcggcgcgcagcccacagcatgatgcgcaacttcttcacgcgccagccgcgcagccgccaagtcctcgagggccacgtgctgagcgaggcgcgcgagctggtggcgctgctggtgcgcggcagcgcggacggcgccttcctcgacccgaggccgctgaccgtcgtggccgtggccaacgtcatgagtgccgtgtgtttcggctgccgctacagccacgacgaccccgagttccgtgagctgctcagccacaacgaagagttcgggcgcacggtgggcgcgggcagcctggtggacgtgatgccctggctgcagtacttccccaacccggtgcgcaccgttttccgcgaattcgagcagctcaaccgcaacttcagcaacttcatcctggacaagttcttgaggcactgcgaaagccttcggcccggggccgccccccgcgacatgatggacgcctttatcctctctgcggaaaagaaggcggccggggactcgcacggtggtggcgcgcggctggatttggagaacgtaccggccactatcactgacatcttcggcgccagccaggacaccctgtccaccgcgctgcagtggctgctcctcctcttcaccaggtatcctgatgtgcagactcgagtgcaggcagaattggatcaggtcgtggggagggaccgtctgccttgtatgggtgaccagcccaacctgccctatgtcctggccttcctttatgaagccatgcgcttctccagctttgtgcctgtcactattcctcatgccaccactgccaacacctctgtcttgggctaccacattcccaaggacactgtggtttttgtcaaccagtggtctgtgaatcatgacccagtgaagtggcctaacccggagaactttgatccagctcgattcttggacaaggatggcctcatcaacaaggacctgaccagcagagtgatgattttttcagtgggcaaaaggcggtgcattggcgaagaactttctaagatgcagctttttctcttcatctccatcctggctcaccagtgcgatttcagggccaacccaaatgagcctgcgaaaatgaatttcagttatggtctaaccattaaacccaagtcatttaaagtcaatgtcactctcagagagtccatggagctccttgatagtgctgtccaaaatttacaagccaaggaaacttgccaataagaagcaagaggcaagctgaaattttagaaatattcacatcttcggagatgaggagtaaaattcagtttttttccagttcctcttttgtgctgcttctcaattagcgtttaaggtgagcataaatcaactgtccatcaggtgaggtgtgctccatacccagcggttcttcatgagtagtgggctatgcaggagcttctgggagatttttttgagtcaaagacttaaagggcccaatgaattattatatacatactgcatcttggttatttctgaaggtagcattctttggagttaaaatgcacatatagacacatacacccaaacacttacaccaaactactgaatgaagaagtattttggtaaccaggccatttttggtgggaatccaagattggtctcccatatgcagaaatagacaaaaagtatattaaacaaagtttcagagtatattgttgaagagacagagacaagtaatttcagtgtaaagtgtgtgattgaaggtgataagggaaaagataaagaccagaaattcccttttcaccttttcaggaaaataacttagactctagtatttatgggtggatttatccttttgccttctggtatacttccttacttttaaggataaatcataaagtcagttgctcaaaaagaaatcaatagttgaattagtgagtatagtggggttccatgagttatcatgaattttaaagtatgcattattaaattgtaaaactccaaggtgatgttgtacctcttttgcttgccaaagtacagaatttgaattatcagcaaagaaaaaaaaaaaagccagccaagctttaaattatgtgaccataatgtactgatttcagtaagtctcataggttaaaaaaaaaagtcaccaaatagtgtgaaatatattacttaactgtccgtaagcagtatattagtattatcttgttcaggaaaaggttgaataatatatgccttgtgtaatattgaaaattgaaaagtacaactaacgcaaccaagtgtgctaaaaatgagcttgattaaatcaaccacctatttttgacatggaaatgaagcagggtttcttttcttcactcaaattttggcgaatctcaaaattagatcctaagatgtgttcttatttttataacatctttattgaaattctatttataatacagaatcttgttttgaaaataacctaattaatatattaaaattccaaattcatggcatgcttaaattttaactaaattttaaagccattctgattattgagttccagttgaagttagtggaaatctgaacattctcctgtggaaggcagagaaatctaagctgtgtctgcccaatgaataatggaaaatgccatgaattacctggatgttctttttacgaggtgacaagagttggggacagaactcccattacaactgaccaagtttctcttctagatgattttttgaaagttaacattaatgcctgctttttggaaagtcagaatcagaagatagtcttggaagctgtttggaaaagacagtggagatgaggtcagttgtgttttttaagatggcaattactttggtagctgggaaagcataaagctcaaatgaaatgtatgcattcacatttagaaaagtgaattgaagtttcaagttttaaagttcattgcaattaaacttccaaagaaagttctacagtgtcctaagtgctaagtgcttattacattttattaagctttttggaatctttgtaccaaaattttaaaaaagggagtttttgatagttgtgtgtatgtgtgtgtggggtggggggatggtaagagaaaagagagaaacactgaaaagaaggaaagatggttaaacattttcccactcattctgaattaattaatttggagcacaaaattcaaagcatggacatttagaagaaagatgtttggcgtagcagagttaaatctcaaataggctattaaaaaagtctacaacatagcagatctgttttgtggtttggaatattaaaaaacttcatgtaattttattttaaaatttcatagctgtacttcttgaatataaaaaatcatgccagtatttttaaaggcattagagtcaactacacaaagcaggcttgcccagtacatttaaattttttggcacttgccattccaaaatattatgccccaccaaggctgagacagtgaatttgggctgctgtagcctatttttttagattgagaaatgtgtagctgcaaaaataatcatgaaccaatctggatgcctcattatgtcaaccaggtccagatgtgctataatctgtttttacgtatgtaggcccagtcgtcatcagatgcttgcggcaaaagaaagctgtgtttatatggaagaaagtaaggtgcttggagtttacctggcttatttaatatgcttataacctagttaaagaaaggaaaagaaaacaaaaaacgaatgaaaataactgaatttggaggctggagtaatcagattactgctttaatcagaaaccctcattgtgtttctaccggagagagaatgtatttgctgacaaccattaaagtcagaagttttactccaggttattgcaataaagtataatgtttattaaatgcttcatttgtatgtcaaagctttgactctataagcaaattgcttttttccaaaacaaaaagatgtctcaggtttgttttgtgaattttctaaaagctttcatgtcccagaacttagcctttacctgtgaagtgttactacagccttaatattttcctagtagatctatattagatcaaatagttgcatagcagtatatgttaatttgtgtgtttttagctgtgacacaactgtgtgattaaaaggtatactttagtagacatttataactcaaggataccttcttatttaatcttttcttatttttgtactttatcatgaatgcttttagtgtgtgcataatagctacagtgcatagttgtagacaaagtacattctggggaaacaacatttatatgtagcctttactgtttgatataccaaattaaaaaaaaattgtatctcattacttatactgggacaccattaccaaaataataaaaatcactttcataatcttgaaaaaa

SEQ ID NO: 231 - DNA, 1192 bp, Homo sapiens
ccagcccgaaaggcagggtctgggtgcgggaagagggctcggagctgccttcctgctgccttggggccgcccagatgagggaacagcccgatttgcctggttctgattctccaggctgtcgtggttgtggaatgcaaacgccagcacataatggaaacaggacctgaagacccttccagcatgccagaggaaagttcccccaggcggaccccgcagagcattccctaccaggacctccctcacctggtcaatgcagacggacagtacctcttctgcaggtactggaaacccacaggcacacccaaggccctcatctttgtgtcccatggagccggagagcacagtggccgctatgaagagctggctcggatgctgatggggctggacctgctggtgttcgcccacgaccatgttggccacggacagagcgaaggggagaggatggtagtgtctgacttccacgttttcgtcagggatgtgttgcagcatgtggattccatgcagaaagactaccctgggcttcctgtcttccttctgggccactccatgggaggcgccatcgccatcctcacggccgcagagaggccgggccacttcgccggcatggtactcatttcgcctctggttcttgccaatcctgaatctgcaacaactttcaaggtccttgctgcgaaagtgctcaaccttgtgctgccaaacttgtccctcgggcccatcgactccagcgtgctctctcggaataagacagaggtcgacatttataactcagaccccctgatctgccgggcagggctgaaggtgtgcttcggcatccaactgctgaatgccgtctcacgggtggagcgcgccctccccaagctgactgtgcccttcctgctgctccagggctctgccgatcgcctatgtgacagcaaaggggcctacctgctcatggagttagccaagagccaggacaagactctcaagatttatgaaggtgcctaccatgttctccacaaggagcttcctgaagtcaccaactccgtcttccatgaaataaacatgtgggtctctcaaaggacagccacggcaggaactgcgtccccaccctgaatgcattggccggtgcccggctcatggtctgggggatgcaggcaggggaagggcagagatggcttctcagatatggcttgcaaaaaaaaaaaaaaaaaaa

SEQ ID NO: 232 - DNA, 1019 bp, Homo sapiens
ttcctttcaaatacacaccccaacccgccccggcatacacagaaatggggactgcgagcagaagcaacatcgctcgccatctgcaaaccaatctcattctattttgtgtcggtgctgtgggcgcctgtactctctctgtcacacaaccgtggtacctagaagtggactacactcatgaggccgtcaccataaagtgtaccttctccgcaaccggatgcccttctgagcaaccaacatgcctgtggtttcgctacggtgctcaccagcctgagaacctgtgcttggacgggtgcaaaagtgaggcagacaagttcacagtgagggaggccctcaaagaaaaccaagtttccctcactgtaaacagagtgacttcaaatgacagtgcaatttacatctgtggaatagcattccccagtgtgccggaagcgagagctaaacagacaggaggagggaccacactggtggtaagagaaattaagctgctcagcaaggaactgcggagcttcctgacagctcttgtatcactgctctctgtctatgtgaccggtgtgtgcgtggccttcatactcctctccaaatcaaaatccaaccctctaagaaagaaagaaataaaagaagactcacaaaagaagaagagtgctcggcgtatttttcaggaaattgctcaagaactataccataagagacatgtggaaacaaatcagcaatctgagaaagataacaacacttatgaaaacagaagagtactttccaactatgaaaggccatagaaacgttttaattttcaatgaagtcactgaaaatccaactccaggagctatggcagtgttaatgaacatatatcatcaggtcttaaaaaaaaaataaaggtaaactgaaaagacaactggctacaaagaaggatgtcagaatgtaaggaaactataactaatagtcattaccaaaatactaaaacccaacaaaatgcaactgaaaaataccttccaaatttgccaagaaaaaaaattctattyyaaact

SEQ ID NO: 233 - DNA, 624 bp, Homo sapiens
ggcgggccgctcccacttcggcacgaggggcacgaggtaaatcttttctgcttactgaaaaggaagagtctgatgattagttactgatcctctttgcatttgtaaagctttggagatattgaatcatgttaccatttctgtttttttccaccctgttttcttccatatttactgaagctcagaagcagtattgggtctgcaactcatccgatgcaagtatttcatacacctactgtgataaaatgcaatacccaatttcaattaatgttaacccctgtatagaattgaaaggatccaaaggattattgcacattttctacattccaaggagagatttaaagcaattatatttcaatctctatataactgtcaacaccatgaatcttccaaagcgcaaagaagttatttgccgaggatctgatgacgattactctttttgcagagctctgaagggagagactgtgaatacaacaatatcattctccttcaagggaataaaattttctaagggaaaatacaaatgtgttgttgaagctatttctgggagcccagaagaaatgctcttttgcttggagtttgtcatcctacaccaacctaattcaaattagaataaattgagtattt

SEQ ID NO: 234 - DNA, 35962 bp, Homo sapiens
gatcatgttaccagtgaataaaaacacttttacctgttccatcctaattgggatgtcttttatttctttttcttgccttattgcatggtccaagacctccagcaatagaagattctagatagaggccaatgatctgggtctgaaactccactctgccattcactagctgtgtgatcttgggcaagtcaattaatatctctgtgcctcaggttcctcacatgtaaagtggagtgatatttagctcctaaggttgacatgaggatcaaatgggataatgtctatatgtgaatacatacatgactcagtgcttggcacatagtatgtgctcaataaattggaatctttgttaatacaagcatgcctttggcgggtgagaagggtggcagatgctcctaccactcaccccactgggcagcccccagaggacatctgaggcagctgtttgcactcccttccttcagccctttctgatgcccattcttttttttttttttttttttttagacggagtcttgctctgtctcctaggctggagtgcagtggcacgatctcagctcactgcaacctctgcctgctcagttcaagcaattctcctattctcctgcctcagcctctcaagtagctgtgactacaggcatgcaccactatgcccggctaattttttatatttttagtagagatagggtttcaccacattggccaggctggtctcgaactcctgacctcccaaagtgctgggattacagatgtgagccaccgcgctcggccgatgcccactattcttgaatcccttgaactagaggaacggacactctgagtttccagcttccctcctgccttgcaggtggcctgctgggatgtatgtctgtggatgagcagaggaagttatggacagtggcaggttagttgccaggcatggctgtttcttcacaatatgattgcctcaggatagtcagacttcttatgtgtcagctcagggcttcaaaggcaagtgtttcaagagaaccaggagggccgggcgcagtggctcacgcctgtaatctcagcactttgggaggccgaggcgggcggatcatgaggtcaggagattgagaccattctggctaacatggtgaaaccccatctctactaaaaacacaaacaattagccaggcgtggtggcgggtgcctgtagtcccagctactcaggaggctgaggcaggagaatggcatgaatctgggaggtggagcttgcagtgagctgagatcaggccactgcactccagcctgggctacagagtgagactctgtctcaaaaaaaaaaaaaaaaaaaaaaaaaaaaggagaaccaggaggaagtggcatggtctattctgacctagcttttgaagtcacacagaggcatttctgacatatgctgtccatcaaagcagtcagaatcctgtcctgtggcaggagaggatgcacagaacccacttctttttttttttttttttttttttaatacggagttttgctcttcttgcccaggctgcggtgcagtggcacaatctcggctcactgcaacctctgcctcctgggttcgagcaattctcctgcctcagcctcccgagtagctgggattacaggcgcctgccaccacacctggctaattttgtgtttttagtagagacggggttttaccatgttggtgaggctggtctcgagctcccgacctcaagtgatccaccggcctcagcctcccaaagtgctgggattacaggcctgagccaccactcctggccagaccccacttcttgattgaagaagtatgaaaatattcagggacatgcttaatatgaccatagacattgacactgtttctaatactttcagaacaagtgatgctttgatgagcatccttaggctgaaatctgtgtgcacgtctctgcttagaaagtttatgcagttggccaggcgtagtggttcacgcctatagtcccagcactttgggaggcacaggtgggcggatcacttgaggctgggagttcgacaccagcctggccaacatggggaaaccccagctctactgaaaatataaaaattagctgggcgtggtggcaggcgcctataatcccacctacttgggaggctgaggcacaagaatcacttgagcctgggaagtggaagttgcagtgcgccaagatcgcaccattgtactccagcgagactctgtctcaaaaaaaaaaaaaaaaaaaggtttatgcagttatttttaccattttactatttcaatggaacacgaggtgaacccagtaggtagatgaggattgaaccaagagttttgggctagagagtccctgctgcctctgttttcatgtttttcagaatttccttgccagttactttcacctggagttcacctgttccccaccccaactcctcagggtccatggttccctcatttcaaggctcattcaaatgcttcctctgtcaggcaagcttttctgtctgtcctccctctcccttccccatctttgaacatcttagcactttgatgactggggcctcaaatgatccagctctgtggtcccacagcacatagctggtgcccagcaaatgcctgctgaaaaagtttattcatcaattcaacagagatttactgagagatttgttgttgttgttgttgtttgtttgtttgttttaatggagtctcactctgtcaaccaggcttgagtggaatggcacaatctcggctcactgcaacctccacctcccaggttcaagcaattctcctgtctcagccccttgagtagctgagattacaggcacctgccaccatgcccggctaatttttgtatttttagtagagatagtgtttcaccatgttggccaggctggtcttgaactcctgacctcaagtgatccacccacccagcctcctacagagctgggattacagacgtgagccactgcgcccagcagagagctgtttcaagggtcctgaaatctgacatggtatgccaacatggaaatctttgttctagaaacaagaggcagggtgcgccatgcagagccgcacaggaaagcaccgggttggtcaggaggcagagggaaggaggggtaaacatgagcaagagcctttattgtggtttccatgggaaggaatgggtgaggcaaggtaagcagccttaggattggttggtttgaataactgcagtaggtgctggggtttatataagggctttccctagctgtctggtgtctggccttgggatgatcagggcagttggatactggccctgagtaagagagcctaataaaggaggtgtttgtgggtgtgggctctggattgggtggcatgcatttgcaagggacctcctgggtgagttcttcactatctccaggaaccagttaaccctggttggggcagtccctctgggaagagcaagtccccaagatctcaaagcatctgagtacagaaaagcaaaggctctgggcacagtggctcatacctgtaatcccagcactttgggaggccgaggcgggtggatcaccaggttaggagttcgagaacagcctggccaacatggtgaaaccccgtctctactaaaaatacagaaattagccaggcgtggtggcaggtgcctaaaatcccagctactcaggaggctgcagtaggttcaagaggagaatcgcttgagcccaggaggcagaggttgcagtgagcagagaccacactattgcactctagcctgggcgacagagcaggattccgtctcaaaaaaaaaaaaaaaaaaaaaaaaaaagagcaaatgcatgcttaatacaagggcctactatatatcaagcatatatacgaaatgggcagtgaaccaaatggacagtctgggtattggtggggctcatatcctgtgggaagacaggcgatgagcagacaagcaaatctgtattttgtaaatatattgtatttttttcaacaaatattttatggctgccctgtgtgccaggcctggatctaagcattgatatatgatgaacagaatagataaagtccctgttttcagcaatgcatgttctagtggggggagactgcaatcaatgaacaaaaaaaaaaaaaaaaagaaagaaaattgaagcccaggcatggtggctcacacctgtaatcccagcactgtgggaggccaaggtgggcagatcacttcaggtcaggagattgaaacaagcctggccaacatggtgaaaccccgtatttcctaaaaatacaaaaattagctgggcgtggtgatgggttcctgtaatcccagctactccggaggctgaggcaggagaatctctttaacccaggaggcagaggttgcagtgagctgagatcgcgccattgcactccagcctgggtgacaagaccaagtctctctctcaaaaaagaaagaaaagaaaagaaaaagaaaaatcagtgacaagaagtaaaacaggatcaagggattaaaaaaaaggactggaaagttattccagataaggtgatcagggaagtcttctctgaggaggtgatgtttgagcaagccatgagtgaggagaaggagccagccacacaaaagcctgggagaagagaattcatgcagaaagagaccagagtgaagggccctggagtgatgagaagcttggtgctgtggaaccgaggggaagccagctagtcttgaggcaggagaatagggtctggaggcagggaacataaggctgattcacactgactttctagaactaaatcaaaaggaaaaccccaactttccacgtccaagtaaccaaaggaccagaggctactccctttgcaatcccagcttttctgtgtgcagatgaaaaactgaaagtacctctgattgctcccttcccactaccagtcaggctggtaggtggccaagtcttcatttgcatgggagtataactttgtaacttcacttcagcctctgattgataactttccacagccaatcagacattggcgtagggtgtaacttttaacttcagcctctgattggccactttccacaaccaatcagactgatcacgggccactccttcatttacacagggcgtacaccaaataaccaatgggaaacctttagagggtatttaaaccccagaaacttctgtaaggagcctgttgagtttctttgcttgagctgttcttgccctgtagagtgtactttcgttttcaataaatctctgcttttgttgctttattctttccttgttttgtctgtatgttttgtccaagacgccgagaagctgggcaccctccaccgttaacagtccggctgcagcatagtgagtaacgcagtgggttaggacgagcgtgaggtcagagacaggcaggagtcaagaagtgctggaagcagagaagtgatttaatctgtttttaaagctctctctggctgctgtgcggagattggatgataggaaggacaaaagtagaattaggaagacaagctaggaggttatctccctggtaagagatgccgttgatcagcctggggcagtggctgcggagatgcacagatgtgtggcatcagtgaatcttagaccttttccgccattgaaattacatagggagttaaaacacgcacagacttctggaccttacctttgcagagccttgtgaaaggcaaataaatcttggggccccaaaatcactaagctaaagggaaaagtaagtcaagctgggaactgcttagggcaaacctgcctcccgttctattcaaagtcacccctctgctcactgagataaatgcatacctgattgcctcctttggagacgctaatcagaaactaaaaatacaaaaaatgcaaccatttgtttcttttttctttctttttttttttttttttttttgagacggagtctcactctgtcgcccaggctggagtacagcggtgcgatctcggctcactgcaaactccgcgtcccgggttgaagccattctcctgcctcagcctcccgagtaactgggactacaggcaccagccaccatacccggctaatttttttttttttttttttttgtatttttagtagagacggggtttcaccgtgttagccagggtagtctcgatctcctgacctcgtgatccgcccacctcggcctcccaaagtgctgggattacaggcgtgagccaccgcgcctggcctcaaccatttgtttcttatctacctatcaccaggaagccccttcccagcttcgagttgtccagcctttccagaccgaaccaatattcatctcacatatgttgattgatgcctcatgtctccccaaaatgtataaaaccaaactgcgctccgaccaccttgggcacaggttgtcaggacctcctgagcttgtgccacaggcacatcctcaatcttggtgaaataaactttctaaattaactgagacctgtctcagatattcggggtttacagactcaatgcctaaggaatctatactttttacaagccccctgggatgtgctgcttcgtctccgggtacccacttgtctactggtcgtaaaggggtaagtgtggccgggcttggtggctcatgcctgtaatcccagcactttgggaggccaaggtgggcggatcacttgagtttaggagttcgagatcaggttgggcaacacggtgaaaccctgtcttcacaagacaaatacaaaaaattagccgagcctggtggcatgtgcctgtagtccaagctattcaagaggctgaggtggtaggattacctgagcccaggaggacgaggctgcagtaagccataatcgtgtcattgtactccagcctgggtgacaaagactctgtctcgaaaaaaataaaaataaaaaaaggtgcgtgtgatgatgcagaaagaggagcactggggatgggagagggggagtccctgtcgttttggattctagtcccagttacgggtctgtttggggggctcggtggccccaagtgatcatcagggatagcaatgcctatctcgaagatgggctgaaagtgaggaatacataacatagtatttgtaaagcactcagcaaaggaccagccgaagcactcgggctatttctggtaaagggtgcaggctctggggtaaatcgcgtgcagttggaacacacatcggctttgcagccatctgctaatgtgaattccattccttttggggcctcgatttcctcctccataaactggtatccacaatgccaaccttgtgaacgctgtgagaatgcgcggggtaaaggcgacgtctctccctcccgggaagaacttggatggtgtcaggcctacactctcgctccgcctagggccgctcgctgggcctggctccccggctgccgggctacgcgagctcagaggacaccatcgccctcttatggccgcggcaggactggaccgaggggctgggctctagtgccttcctccaggcacggcagagggcgagggtctggcagcccgcttacccagggcctcggggcactagcattcatgtcatcgactgcctggcagggctggctttcttaagtgtggtcgtgagacttgcttaagtggaagaaatgctgtcgctttggagatttataaaacaattggctcgatggatctttcttcaggaggcggacttggtttaccggctttactgaccacagctgatgccaatgatttcatttaatcgtctttagagtccctgtgcatggggagttaccatccccaattagtttcttgtgaatgcagggcaaggagagggagagggtagtgggggacggggagaaggggcgaggggtaccctcctattaaaacggagccgcagaaaaacccacagagacatccgtctgttccccgctgagtccttagaacagcgcctggcacacagagagcgctcaactcgctgtgtaactaaatgcaagccaagatcttcgcattgtgtgtgctcttcccttccctaccaaatatacctggcttgcaaggtttgacctgttttcttagacgatttttaacttgtttccaaaagaaatattggagtaaattagcttgttcaaaggagtccttatgaaaggacagaaccaagtgagaagtatctggagcccggtttggggttatagatgatgatgttgagccagcacccacggggcggccgcaatgtagaatcctggcgctactgggaaccgtgtggaaaggggctcttctttctgttcaaatagtgttttctgtagatcccatctctccatcctcctgagctctctcttacaaaatatcggatttcagcagcttagaattggacagaaactcagaggtccgtttctcaattatctctaaccctggtaaacaataaatgggatgatgagtacaagacagttttggtaaaaagtcacacgccacacaacgtgagattttattattccacgggtgcttccttgccaatagtagacatggcagctcggctcccttcccttcgggttcgccttattgttgccaattgtaaacatggcctctaggccgtgagttctcattggcagctgctctgagtccccgcccttccccgcccctccgaacgcggcctggagttgtggagtcggatatcgcagctcccgactgagctgcgcctgcgcaactcattggcgccaagatggcgatggagatgaggcttccagtggctcgcaagcctcttagcgagagactgggccgcgacactaagaaacatctagtggtgccgggggatacaatcactacggacacaggattcatgcggtacgtggggacttgggggagtcgaggcttcagagagcggcttcagggctctctgcacgtggtccaggcctcgtatccctgtgtgtgtaactccccgcgggacccagggcacttcgtctgagcatcctacacacctcgcttccgagcctcgtgcttcttgctccctgcatcttgtgtgtccccgtctgcatttgtctcagctccctgaaaccctccactcctgacctccggtggctgtgacttttgggtcttctgcctgaagtccaaatctttgatccttccttgtgggagacctggaaagctggggagggttaggtgcaggctcttttccagttttcagctctctgaggggacggtgggcgttcttggctgcctcctcttcagtttagaatccgtaattgttcgatcttagggcaaacagttacattgtgctgcatgcacccatttatacacattttgaatctaaggggtgtagtgcagtgtattgtggttaagagggaaggctcttgagtcagacagttggggttccggtcctgctaccatcacatcttattagcggcattgcctctccacggtcagtttcctcatctgtaagatagtgataataacagtatgatacggtaatgaggattaaatgagacaattatgtaagaaaagaagtaaaaccagccattatatcatcatagataacactagtgtttcaacctttattattattatttttttacttgtatatgtacaaggggcacagcattcatagcattgccctttaacctgttagtttaaggttagtggataccaggaaatttttttttcttttttgagacggagtctgtcttagatcagtcgtgcgatctcggctcactgcaacctctgcctcctgggttcaagtgattctcctgcctcagcctcctgagtagctgggattacaggtgcacgccaccatgcccagctaatttttggttttttttttttttagtagagacagggtttcactgtgttggccaggctggtctcgatcccctgacctcaagtgtgatctgcccgcctcggcctcccaaagtgctgggattacaggcatgagccaccatgcctggcccctaggaaatcttaagattcattctttcattaatgctttcaacatatattttgtgcagttgggttattatggcagagtgaaaaatctctgtcctggtggagttctaacagggagagatagataataagcgcaatgaataagttattcagaatgttaggcaataatgcaatagggaaaaaagtggagcagggtcaatggtatgtggggggaatggtggcaacagggtgggctgtgttttcaatggcacagtcaaggtaggcctgctgcagaaagtgacacctgagcagacctgagtgagaggagtgatgtccaagtagctgtctggagaaggagcactgaaggcagagggagcagccagcacagaagccacgctttgcagggggagcctgttagctttgaggaacacgttgttcttgaagggagagaagtcatttcgagttaccctcgtatcctttctttgtatcttcgccttgcatcaggggccatggaacgtatatgggagaagagaagctcattgcatctgttgctggctctgtggagagagtaaacaagttgatctgtgtgaaagctttgaaaaccaggtgagaacaaaaggtgtgtattccctttcttgcagcatcaggttgtacaaccaggcttttcctgccccctccttatcccccaccccacccctgcctgccctgtcatgctgtaagtctgaggttttgaccatgactgtaggtggggtggtgcagatcagtgcaggcttcagaggtttccccatgttatgtcaccactccaagccttggttacctcctctgcaaagtgagtataatagcatggcctacttcataggattttctctttttttttttttttttttttccgagatggagtcttactctgttgccgaggctggagtgcagtggcgtgatctcggctcactacaaccttcgcctcccgggttcaaacaattctccttcttcagcctcccgagtagctgggattacaggcgccctccaccacgcctggctaatttttttcgatttttagtagagacagggtttcaccatgttggccaggctggtctcgaactgctgacctctgatgatttccccccacttggcctcccaaagtgctgggattacaggcgtgagccactgtgcctggcctaggattttctttagaattcagtgagatggtgcctgtaaagtatttagcacagagcctgatacctagaagcattcaatgaaggttagccccagaaagcaagccagtggggttggaacagagtgagtgagggggagagaaggggcagatgtaagcagagagctgaggtgggcgggcgtgggcctgccttgtagccagagtaagcattttggcttctactttgtgtaatctgggaagcactggaaggggtggagcagaggagggacttgatctggacttaagctcactctggctgctgatgggagattgaagggggatagggcaagcttagggaggtggattagggaccatactcatgatctgaagtgatggtggcttcaactaaggtgggagcagtggaaggtggaggagtgattggaatctacacagattttattttccgagtgtttttttaaaatcatgaaaagctgttgggttttgtattctttgggctttactgtgcataggaccccgtcaactgtgaatagaaataagtttacttcttcctttccaatttggatgccttttatttcctgcatatgttttaagggtagagccaacaggttttgctactggacttgtcctggagcgtgagagagagagaggaatcaaggaactctccgaggtttttggcctgagcaactgaggggatggagtcaccgttgactgagatggggacaactcatcccctatctcggtttgctatggaggactggagggggctgcgggaaagcttagttttgtgcttgatacatttgaaaatgcctgttagtcatctagatggcagagttgggtagctagcagttgagtaggatttggaattcaggagagtggcacagtcacagcacagagtggtgttttaaaggtattagattgagtggccgaaaagtgaagaggtctaaggacttagcctcagcactgagtacgtctcattagaatcgcgggtaaggaactagcaaaggggcttgagaggagcaggcagtgagtaagtggaggagacgtgagcagacttgtgtggttggagtcctggctcagatttcctttctcttcctttggctggtgcagaactcatccatgtgccacaggaaaatagtccgtgtttttcattgtcgtgtaatcgaacaaaatagggtttttgggctaaatgaactacttggaatggtgatatgtctaaggatagttaatggagactttatacgtggaggaatgtttgaagttagcagtttctgaaagtaagtccagacaatatagttacatgaatttgctgaatgtggcgcctgttccaggctttcaccctgttgaaccgacatctcaaatggtgtgtggtcttgtcagaaagtctgctcacagatggatgaaccccttgtgttttgtctttcagatacattggtgaagtaggagacatcgtagtgggacgaatcacagaggtaacgtcgatatcagattggtgtttacaaagtcgaggcaggctggcgatttcattcatgggacagtcattccacttgtagttacatgaaaaaggcattcattgcatttggccgttgtgtggcttctgatgtaaatatgtggcttgttcgatttcagattactggttcatgtttttttttttttgagatggagtctcgctctgtcgcccaggctggagtgcagtggcatgatcttggctcactgcaacctccacctcccaggttcaagcgattctcctgcctcagcctcccaagtagctgggattacaggcacccgccaccacgcccagctaatttttgtatttttagtagagatggggtttcattatattggtcaggctggtctcaaactcctgacctcaagtgatccaccagcttcggcctcccaaagtgctgggattacaggcgtgagccaccacatctggccttactggttatttatgatatgacacatgaacatggagcatgtgtccaggtgtggaacttggcttataggttcaacagaagaggtggaaggtggagaccaactccaggctggattcggtcttgctgctctcgtccatgaaccttcctggaggagagctggtaagggctacagctggggccatggactagggcccagtgggctggggggagccgtgggaccctttgttccaccagaggactttgatttacactgaggttgcccctttgactcctgtttgtctgctgtgaagtttgctgcctagatgtgtatgtagacttttcaccctgtccaggtctcccgaaagagggagcagttggcatatggtaggatcagaaacatccatggggtgggatcccaacagagagttggggagagaagcccttagatgctggttgttaacagttttccttttggatataacagccttgcatagtgaagatgttccttgaaaagttgtctttacattaggtttttgtgaattgaaaggcatttcattcaaccatgtgtggaatgtggttgctggcattccagacaaccacagtaactaagccacagccttttgtaaaatgccatggttcaccttgatcttcagtccagcgtgtatttacagagaggcttactgtgccaagctctgtgccgagtgccaagcacgattgagttccccagcaggggatataagataactgacctagtccctggcagtagaagaataaataagctgtggttatacaaaaggaaatttcagtgagagaagcttgtaggaaagacaggcattggagttgatcctggaaggatggagagactttgaatgactagttcagggaatctgagataaagggaaatgtatgagcagagatatatccaagcaggagttagtctggtcctgctggaccacagagggctgtcatggaagatgactatggaaatgttggctaggtgagattgggaggggtctgaatgttcctcagagaagggagggaaagaggaagaggagctgtggaaaagtcttttgagatggaaagtcgtgattatcactgattcccctcaagtggcttgggttacctactcttgctatagttctcagtgcttgaatattgtggttggcctcaaacatctcaaaaggaagtgaaagagaagtgatggagacctttctgaggatctggcttaagtaatgtcatttctttgtgtatttcagaggagaagatctgcagaagatgagcttgcaatgagaggtttcttacaggaaggggaccttatcagtgtatcctgcgctttgcactccagcctcttgatgcttttctgtgggactgggaaatgggccttccattgtatgtctctgacggaagaaccatgtcatccttgcagggatccgagtcttagaccaagtgtcgggctctgctgcatcctttctcagtctccttaattcaggctgactccccagctcttgttgggacctgctgctaagtcatttctttgggtcttgtaacttacggtggcctgtgctttagactaggcttttgttaatggtgttaacttttagcgcagggagtggagaaggtgttgttcacgtcaagatattaatgacaggccgagtgtggtgactcatgcctgtaatcccagcgctttggaaggccaaggagggaggactgcttgagcctaagagttcaagaccagcctgggcaacatagcaagacccccctctctacaaaaaaattaaaaaagaattagccgggcgtggtggcacatgcctgtagtcctagctactcaggaggctggggccagagggttgcttgagcccaggagctcaaggctacagtaagctatgatcacaccactgcattccagcttgggtgacagaacaagactctgtctctattttatgttattttttaaatttttctttttttttaatgacggagtcttgctctgttgcccagactggagtgcagtggcgcgatctcggctcactgcaacgtccgcctcttggattcaagcaattctgccttagcctcccaaatagctaggattaccggcgtgcgtcatgcctggctaatttttgtatttttagtagagacaggtttcaccatattggccaggctggtctcaaactcctgacctcaggtgatctgcccacctcggcctcccaaagtgctgggattacgggcatgagccaccatgcctggcctctgtctttattttatttatttatttatttatttatttatttatttatttatttttttgagacggagtttcactcttgttgcccaggctggagtgcaatggtgggatctcggctcactgcaacctctgcctcccgggttcaagcgattctcctgcctcagcctcctgagtagctgggattacaggcatgcgccactatgcccgactaattttgtacttttagtagagacggggtttctccatgttggtcaggctggtctagaactcctgacctcaggtgatcgacctgcctcagcctcccaaagtgctgggattacaggtgtgagccaccgcacctggccttctgtctgtatttttaaaaaaaagatattcatgacaaccaaggggagaggtaaggtcacagtgatgtgctctgggtcaaagattgttgagcctggaccattggagaggggaggaaaagatggaggtgtggggtcaaggggagaggctgcagaggacaggacagtgtgtggccaaggctgctgtttgttccttcatcaccctggccaggctgaggtccaggcagtgttctctgacggagctgtctctttgcacacgaggagcctgaaatatggaaaagtaagtcgggctcttgatgttcctgtttgctgactgagactacaaggctatttttgaatccccatagctctctggaattctggcctaaagaaccccagtagctaagcattaatagaggctggcatcccacaaactgatcgtgttccttaaacgtaacatcaggacggtcagggttcacagggtcatgggtcagtagccttgtaaagaacaagttttatcctttttctccaaggagactgactttcaccagaagagcccctccaactgtgggctgggaggtgcagctgtctctcttcctccagggggcgctgcagctcagcactggggctgaggctgtcctgggaacaaaggcaggctgggtctggttaaacagcccttagacaaacgtccaatcagtccagtggatgttattgctggcaaagcttgctctgtcatctgagcctctaaatggaatttcactgcttttcttgtacgaggttgcattattgaagctatttactattttaaggagagcatacttcctaaaacaaattaggatttactagtctcttagctttatctgggtgaacgtttttattttctgagtggaacaaaaacctcttcccttaatggagtggctgcagacagccacgttgatgtacatggagtaggcagaggactgctgcagtatgctgactttcacaaccctgggtcctgcggactcttccttggcaggacgtggacttgagctgtcctgccaggaccagacatggatttgcacccagctccacccatctccttacctacccagaggcacacatctcacaggcaagatgagtgtttggggttcaggtatgagctagggtcatggaacaacgcagtgctcctgggccagcaggaggctccagctcacttcctcattggcttcagcttctctaatgtctggcacatgagttctggcttagagtgcaaggaagactgcaaagggaaatgacagagaagagtattgaaggtcaccttctgctgggatgtatgaatagcctctgagtcccaaagcgttctctgcaaaaatgtgtactatgtgtatgcatgtaggcgacagcaattataaacaggaaggacaccaatttgaatatacttaggatgtatattctgtagtctccttttcattcatcccgccaatcttgcagtgacctagcttcgtgatatatttctttagctaggtcagggggttttggtccaggtttccccctccctggtgaaacggcagaagacccactttcatgatttgccatgtggtgcctcagtgattctcggtaacaacggcttcatctggatttacccaacacctgagcacaaagaagaggaagcagggggcttcattgcaaacctggaggtgagcaaacactgtggccattttcagtgggatggagggggctcagtctttgctgtgtttttgtggccagtgaagttggttgtttttagctatgttactggtgtaggctgagtcactttgactttccatcacggtatgttcatgaagcccatattatcttctcttctaaggagatgaattcagtgaatggtttggtgtttgttggtggaggtggcaaagttgcagggtaatagccgaagagccagtgaagaagccattctttttctgtttttttgtttgtttgtttgttttgttttgttttgttttgagacggagtcttgctctgtcgcccaggctggagtgcagtggtgccatctcggctcactgcaagctccacctcctgggttcaagtgattctcctgcctcagcctcctgagtagctgggattacaggtgtgccccaccatgctctgctaatttatctatttttagtagagatggggtttcaccatgttggtcaggctggtcttgaattcctgaccttgtgatccacccacctcggcctcccaaagtgctgggattacagacatgagacactgcaccctgccccattccttttaatctcccttggaattagctgtttggttgatttggagttccagggtgatactgtctgagtcataaatgatttatttgtgaatttctgtggctggtcacgtattttggtcctgtttgtatttcccttcccctctctgtgtctccttatagcctgtctctcttgctgatcgagaggtgatatcccggcttcggaactgcatcatctcgctggtaactcagaggatgatgctgtatgataccagcatcctgtactgctatgaagcatcccttccacatcaggtactctccccagggcctctcccttcttcactgatctgtgagctgctctgttgtttgttcagagacaatatgcacatctccccaatactttcccaacatccgtcagtatgaactggcctgaaacagccttaatgagtgtctggtagatctttccctaagaaacttgcaatattctcaatgcctagtgtcagtctaaggattttggggcaggaggtgtcaggtgggactagtttatgagagcaacctctggactacatcttacctctcccaaatttcagccagcttttggatgaatgtcagaataatatctttgttcttgtcgactatatcccagagcatcttgctgatttattaggctgcttctagcagatcatatcttgtaacgcttagtctctgagacatgaaaggaatacagaaagtttatgttaacggcttgatttatgtttggattggcttggtggtctgtttatggttggtttcttttctgaacaaatgccttttccctttttcagatcaaagacatcttaaagccagaaataatggaggagattgtgatggaaacacgccagaggcttttggaacaggagggataaggaggtgctccagaagcacgggactgtggaccttgcaggagtgaagactgtgatgtgtggtccccatatgtggctcagcaaagactcgagagatcatccctttgtctgcattgacggccctgtgacggcctccagcccacaggcctgctttctcctgtcctaacaccaagcctgggtggcagatgaacagtgcttccttgggttgccagctgagtcccggtattagggaatagtttcagctctttcaaagtgcacagtgttacagtcgaatgggctcccatcctggaataatatggagaatcctttgtcttccactcactgtcattcacaaggcacagtgccccatgaaattgccccaatagaaaacatggcatccctgacctccaaatggtctgttttggcctccattcctatatcctttaaatgactgagaatgcagctggtaaagttggaagaataaagttaaccaagcaggccaggcacggtggctcacgcctataatcccagcacttagggaggccaaggcgggcagatcacctgaggtcaatagttcgagaccagcctggccaacaaggtgaaaccccatctctactaaaaatacaaaaaattagccaggtgtggtggtgtgcacctgtagtcccagctatttgggaggctgaggtgggagaatcacttgaacctgggaggcggaggttgcagtgagctgaaatcgcgtaccacactccagcctgggtgacagagcgagactgtgtttcaaagaaaaaaaaaaacaagcagccttttgcttggttggaatctgattttctgttgcgtgttccttgtagccatagatgtgattatgtccacaccgggctgccttaatctgtcctgcttggagagtgacttgtaagatgctgaattattcatgataatacagtgaatgttctgggtccatgtactcagataaacatgaagaaaataagcaaagaaaaatggagactgggaaagcaaagctgttttcatcctataattgaagtagtgtggagcattaacttgtggatgattcagagttaaaagataaaaagacgccagagttctcgctgaagaatgtgagaattcctgtgcattgttttttctgatgactatctaaaaatggtgccctgatgtaggtttgggggaacattcttaaaaacaagggtgctatgtgcctgtaatccagcactttgggaagctgagtgggcagatcacctgaggtcaggagttcaagaccagcccggccaatacagtgaaacctcgtctttaccaaaaatacaaaaattagccgggtgtggtggcacaagcctgtatgtagtcagctactcaggaggctgaggcatgagaatcgcttgaattcgggaggcggagttgcagtgagctgagatcgcaccattgcacttcagcctaggtgacacagtgagactgtctcgaaagaaaaaaaggaaaagaaaaggcggccggacgtggtggctcatgcctgtaatcccagcactttgggaggctgaggtgggtggatcacaaggtcagatcgagaccatcctggctaacatggtgaaaccccgtctccactaaaaatacagaaaaaacaaaccatagcctggcatggtggctggcacctgtagtctctactacttgggaggctgaggcaggaaaatgacgtgaacccgggaggtggagcttgcagtgagctgagatcgtgccactgcattccagcctgggtgacagagtgagactgtctcaaaaaaaaaaaaaaaaagggacactatatgcaagcgctgtcttcacatatgtggcaaacttgtttgtttgtttttgagacagagtgtcgctgtgtcgctaggctggagtgcagtggctcgatctcggctcactgcaacctccacctcctgggttcaagcaattctgcctcagcctcccaagtagctgggactataggcatgcgccaacacgcccagctaatttttgtgtttttagtggagatcgtttcaccatgttgaccaggctggtctcgatctcttgaccttgtgatccacccgcctcggcctcccaaagtgtttggattacaggtatgaaccactgcacccagccatattttttgatatttatagacgtcttttttttttttgtttttttgagacggagtcttgctctgtcaccaggttggagtgcagtggcgcgatctcggctcactgcaacctccgcctcctgggtttaagcgattctcctgcctaagcctcccgagtagctgggattacaggcacgtgccaccacgcccaactaatttttgtatttttagtagaggtggcattctaccatgttggccaggatggttttgatttcctgaccttgtgatccccccgcctcagcctgccaaagtgctgggattacaggcgtgagccactgagcccagctatagatgtcttaacatcattgttttctgttcttttgttccgggtaataataaggagctgaggacagctgaggaagggcttggctgacaaaatgccttccgacagagccctaactactccacgtaaacctaggacagtctcaatggtagtaactttgaacactgcatttgataactttcaaatacaacttggctctttttcattaaatggtatgcttctctataacaacacaataaacaacttcttacctcactttctttttttgagacagggtctcactctgtcacccaggctggagtggggtggcatggatcacagatcactggagcctctacctcccaggctcaagtgaacctatcttagcctcccgagtagctgggtccacaggcatgtgacgtaccaccatgcctggcttttttttttttttttttttttgagacagggtcttgctctgtcacctaggctggactgcagtggcacaatcacgtctcaacctcctggtctcaaccagtttccaacttcagccttctgagtagctgggactacaggtgctgagccaccacatccagctaattgtttttgttttttgtttttcggcagagatgaagtctcactatgttgcccaggctggtcttgaactcctgacctcaagcaaccctcctgctcaagccatcttcccaccttagcctcccagagtgttgagattacaggcatgagccaccacacgctgcctattttttttatttttacgaatttttttgttgttgcccaggctcaagcgatccacccacctttgcctcccaaagtgctgggattatgtgtgtgagccacagctcctggcctctttttttgtttttcctatcccaagttgtattactagttttggggagtttgcagacaattgaatattctataggctgtgttgcagctttagatggatcgacctgtcatgtttttgaggttatccaggctgtatatctctggagagaagggaatggcaaagagtgggagtctgagtcaagtttggttttgtttttttaagagacaaggtctctgtaatccaggctgcagtacactggcatgaccatggctcactatagacttgggctcagccaatcttcctgcctcagcctcctgagtagctgggtttggttttccccagggccatatgtcagcttatttaccctcctcacttggtgtctcccagcctgccagcccatgctgttcatccagtatctgctgaatggtgattacctattaagtggaactaacacaaaattgcttatctaaaagcaattattggtgattatttccttgcagtggcccactagagggcgccattgttaagtgtaattccagtaggtgttttgtgttttttttttttaatggaataaactgaaatctttacatggtactgaatccctttagcaacttggggggttgctttaactgaatcacttttaatgaagatatatgaacttgaagggatttattcaatatatgacaatattactcaatattacttttttttttttttttttttgagacaaagtctcgccctatcccccaggctggagtacagtgacgggatgtcagctcactgcaacctccgcctcccgggttcacgtgatactcttgcctcagcttcctgcatagctgggactacaggcacccaccaccacgcccagctaatttttttgtttgtttgtttgtttgttttcctgagacggagtctcactgtcacccaggctggagtgcagtggcgtaatcttggctcactgcaacctccacctcccgggttcaagcgattctcctgcctcagcctcttgagtagctggaactacaggcacgtgccaccatgcccagctaattttgtgtatgtttagtagagacgaggtttcactgtgttaaccaggatggtctctatcttctgacctcgtgatctgcccgcctcagcctcccaaagtgctgggattacaggaatgagccactgcgcccagctgaatttttatatttttagtagagatggggtttcgccatgttggtcagcctgctcttgaactcttgaactcaggtgatctgcctgccttggcctcctgaagtgttgggattacaggtgtgagccaccacacccagccaagcaatatttatttccgattgtcaggcatttgccaggctttggattctagtttttaagcccttaacagtatcattcagggcctatgttctcaggacctcttgagactgtgcctcggtttttaaaaaaagtatcattctacagtattatacaggcatttttaaagtacagtgcattggccgggtgcggtggctcacacctgtaatcccagcactgtgggaggctgaggcgggcggatcacctgaggtcgggagtttgagatcagcctggctaacatggggaaaccccatctctactaaagatacaaaatgagctgggcgtggtggtgggtgcctgtaatccctcaggaggctgaggcaggtgaatcgcttgaacccgggaggtggaggttgcaatgatccgggatcgtgccactgcactccagccggggtgacagagtgagactctgtctccaaaaaaaaaaaaaaaaaaaaaatacagtgcatctctagaaaaaaatactagagtctgggcattgggcatggggctcacctaaaacaagaaaatggcaaagtggaaaactagggataaggctttagatcaggtgcagctgacctctgctgtgactcccaggaagcatagtcccaatctttgtggaaaaccaaatgagatctagtttgatcctcatgaaccctgtctctacaaaacaacaacaacaaaaaaacgtaggtgtggtggcatgtccctgtagtcccagctacttgggaggctgaggccagaggatcaccagaacccagaaagtcgaggctgcagtgagctgagattgtgccagtgcactccagcctggccaacagagtaaggccctgtcttcaaacaaacaaatcaaattaaacaaaaaacccaaaacccttgtaaagtaagctatgacctccatttacgggtgaagaaatgaactcagaattaaagggacttgatgaagcccctttgaattgtgaatcaatgtagatttaagctctagggaggtgtcataatgcagtcctttagaggatggactggactgactgaaagtttatggacccagaaatttaattccagcattgaggctgatcttttgtttggattgttattttgcttattgcccatccttccatgtaggttccatgaggacaagggtgggtttcttcccccaccactgtgtctcagcacctaaagcagtgcttcacatacagatgttcaataaatgcttcttaagtgaattgttatttattttttgagacatggtctctgtctcccagactggagggcagtggcgcaatctcagctcactgcatcctctgcctcccagactcaagcaattctcctgcctcagcctcccaagtagctgggattacaggcatatgccaccacgcccggctaatttctgtatttttagtagtgaggggtttcaccatgttggccaggctggtctcaaaactcgtgacctcaagtgatccacctgcctcggcctcccaaagtcctgggattacaagtgtgagccaccgcacccggccatgaattgttagtttaaaaaaatgtgtattaggggttctgatttgactgctcaattttaagctaaactagagaataaagcatgtgcgcggtggctcacacctgtaatgccagcactttgggaggctgaggtgggtggatcacgaagtcaggagatcgagaccatcctggctaacacggtgaaaccctgtctctactaaacatgcaaaaaaaattagccaggtatggtggcgggctcctgtagtcccagctactccagaggctgaggcaggagaatggcgtgaacccgggaggcggagcttgcagtgagctgagattgcaccactgcactccagcctgggcgactgagcgagactccgtctcaaaaaaaaaaaaaagaatctggagaaaatgactaaagtatgaatgggaataaaaagaaagcacaatctccagaaggaataattaggatataatcaggataagataatgggtaaataggccaagtacaatggctcatgcctgtaataccaacactttgggaggccaagagggcggatcacctgaggtcgggagtttgagaccagcctggccaacatggtgaaaccccatctctacaaaaatacagaaattagccaggtgtgtggcatgtgcctgtaatcccagctacttgggaggcaggagaatcgcttcagcctgggtggtggaggttgcaatgagcagagatcgtgtcactgcactccagcctgggcaacagagcaagactgcctcaaaataaataagtaaataataaataatgggtaaataaagcagaacaagggcattcacagttgaagaatgacactacagatcagaactaagattgtcagccagataattttgtgagagaacaaagctaaaccaaatcacatctgaatttataaattccagttctaaatctacgcacaatttttcatgttttccattccgtaccttccaagtaactaattcctcttgaaaccagtatcaaaaataagtgtcatctttcaatgcgacagaaatatttctaaaatacttaatataatagctgaatgtacaacactcatcgtgcagctgttcctccgatatcagtagcaacttgtgaaaaatcagtggtctcagatcaacaggtttttgatactgaatggtacagtgggaaccatgggttttggagcaaggtcagtctgggatgaaattgtgactctgtcacacattggccaagtgaccttgggtaggtaagtcacatctctgtttccccatctgtattatggggaatagtattacatgcctcactgggctatagtgaggattacatgagataatgcagtttatggaaagtgtaaacagtgctcggtgtaaagtaggagctgtgataagtggatccctccttagaaatgggatctcgggccaggagcagtggctcacgcctgtaatcccaccactttgggaggccaaggtgggtggatcgcttgaggtcaggagttcgagaccagcctggccaacatggtgaaaccctgtctctactaaaaatacaaaaattaggcacgtgtgatggtgtatgcctgtaatcccagctactcgggaggctgaggcaggagaatcgcttgaatccgggaggtgaaggttgcagtgagctgaaatcctgttactgcatcgcagcctgggcgacaagagcaaaactccatctgaaaaaaaaaaaaaggaaagaaagaaggaaagagaaggaaagaaagaaggaaagagaaaggaaggaaagaaagaaagaggaaaaaaggaaaggaaaaggaaaaagaaaagaaagaaaaggaaggaaagggagaaatgggatgcctgtcaggtgcagcgctctggggaggcgtggagagcctataatagggaccaaggtgctttttagtcgcagaacatggattatttgttaggtgtggctttggcacatctaggtcattggttctgccgacttgctaaacccaaccatctgggcattttctcggctaatatagaggatgttttcatgtgaacacgtgtccacctgtgaaatgtttataatgttaaaggttcgttctggggcaaacatctgatagcgcctggcaaacccaacaaatgccttttctgtaatgagtaagcctcctaatgcccaaagaaacagttgaattcgttagcaacatgtcggatgttttccctatgtctgtatatttcttcgctagtttttttttttttttctttttgagacggagtttcgctcttgttgcccaggctagagtgcaatggtgccatctcgcctcaccgcaacctctacctcccgggttcaagcgagtctcctgcctcaacgtcctgagtagctgggattacaggcatgtgccaccacgcttggctaattttgtatttttagtagagacggggtttctccatgttggtcaggctggtctcgaactcccgacctcaggtgatccgcccgtctcggcctcccaaagtgctgggattaccggcgtgagccaccgcgcccggcccgctagttctaatatttatgctttttggagggtgaagggcttgaaaggcatcaaaaaccttggtttctaggagcgagccaaattttctcccttagagactgaaggaggttatccgactccgcttccaggaaaatccaatccgcaatttttccctcgctttggctcttccaggtctcactactcgcgccggggagacgcggtccggcctacgctaggccggcaagaatctaccaggtcccaggagggcggggccgagccccagaagtcggggcccgggccaggagtcttggtgcaggcggactcgggcgcgtgccatgggaccacaactcccggcacgcaccgcggactgcgccgaacacggttggctgggagatccaaccctactgctcccaccggccaatgggacggaggaaagaggcctgacccggattctcggaggccaatggcaatacagaggaggcgggtgcttccttaccactcaccttgcgctcagagaagccacatttaaaaggtcgtgccgggccgggctttcgcaggcagtgggaccagagccgggaggggcggcggtgtcccgggaaagcggctcttggggcatccgggtcccctcgaggcgggctccggacgtcgccgtgggcggggccgagggcggggcctggcctcgttgtggagcggctcgtaatccatcatggcggccgcggggtttggtgtctgtgcctgagcagcgctggagccggagccggttcccgggtcctgcggctgaggagcccctccgctgtccacggcccctaccggcggggggcggctgggtccctcggcggagctcgggagatgtgactgcctgagggcggtggtggtgtcagcgtccggggccgggggagggggtgtctcgggcagagacccccgggcttggggcagctgaggcggccgggcctcctctacacggggcccgccttccgctgtctgggccgcgagagtccttcgtcccttacagccccgccccggctttgggacactgcgggtggtctgtttcccccagcttgggacaccccgttttctgaggcgtggaagagcgtcgccccggagtaagctgcccgtgccgcgccccgacagcttccctcagccccaagccgccccttattccggatcccggccccaactttggccacggagcctcccattcaaatccctcccttgctgtcaaggggtctccccttcccccaaggtggctcccgcgagcctctaatgccctgacttcttccaatgtcacctacggcccccttagtctcagctcagccaaaaactttaatgcaaaggaaaagtctggattggttccacaggccttttaaaaagcggacttaaaagttgctggcaatgcattccttttcgtcagagtcgagggcaaactcgctgaaatctgggtgacccgtgtccttttccggagagcaaagcagagaagcgagagcggccactagttcggcaggaaatttgttggaagatgaagaagctaagatagggggttggtgacttccacaggaaaagttctggaggagtagccaaagaccatcagcgtttcctttatgtgtgagaattgaaatgactagcattattgacccttttcagcatcccctgtgaatatttctgtttaggtttttcttcttgaaaagaaattgttattcagcccgtttaaaacaaatcaagaaacttttgggtaacattgcaattacatgaaattgataaccgcgaaaataattggaactcctgcttgcaagtgtcaacctaaaaaaagtgcttccttttgttatggaagatgtctttctgtgattgacttcaattgctgacttgtggagatgcagcgaatgtgaaatcccacgtatatgccatttccctctacgctcgctgaccgttctggaagatcttgaaccctcttctggaaaggggtacctattattactttatggggcagcagcctggaaaagtacttggggaccaaagaaggccaagcttgcctgccctgcattttatcaaaggagcagggaagaaggaatcatcgaggcatgggggtccacactgcaatgtttttgtggaacatggtgagtgcttttcaaaatttctgctcatggttttcctcatgcattcatcttaggccttcaaggaactttgaacaacagtacttgcgacagttccttccaattccacttaataaatttgttactgtagttatctcttagtggaactttctttgtataagaaaaagttacttcgtgacttcggctttattcaaaatctatttgagttgcttatttcttgcctgattcctctgctaattcactgttgaccttggacaagccactttactgttccagggctttagtttcctgaggggctggacttcagtggtttcttagggtccctggttctatgattctgctctaaccgaagtcgtgggctcttctgacaagcatggattctttactgctttgtctacagagagcttttatcatattctcaaagtggtttgtgttcctgagaaagttaagaatcatagatactggttgacgctaatatccttgaccttttccttcgtaagtaggacttgaaaatactcactttggagccatgtgggaaaaatcaagtggggaagcagcattccttgtgaattttagatagacagcttctgtcttaccttccataaggagtaatctcttcctcgttgatgaagctttcatcctgtcttctccctgtttagaatgatatttgggccaataaaggttatctgtgacatttttatgaacatatttggcatttgaatgctgcccgtacattttatgttgttcatgtccagtaattctgtgcgaagttaaagctaagggtcggcttacactgatgtctataaccagttaattagggttactgtttgtactgttgcagcctgacattttttggattgtgtcctttatattaaaaaatcagttgagcccacctatcctataagcaaacgtatgaagtgtgccagtggcttatactttgaaattcattcagaaataccccaacattgggtgactgcagtcaacaaaggcttctgttggatgaacttgcatttgacagctgaagttttactttcttacgggaaaatattcacttcatctaaataaatccgggtgcttggattttactttgccttgaaacattagttctattttagctttgtttttaggcaggcaaatatggtaatgtgttgttatgatggttcccaaattcaggatttaaaaagtgaattatttacattttaactagtgatgatcatgcaccttacatagtgaaaattggaacagactttttggagagctttggcggaacttatcagaatttgaaatgtacgtgccaatgacccagtaatcccattctgggaagctagtagagaaagcagtgtagttccctgtgtgtccctgatatctcttcaggggttgagaggctaaaactattttcttgttaatagagtaccaaggtcttgtctcttttgctgtgttgacgtttgcagtaatggtacaaaagtaaagcaggtgtcttagcatgattcagggttgtggcacctaactatacttgtagtcattgcattcttcatgacgtgcactcacagttaaacaaactaaatatatatatacacacacacacacacacatatatatccacttttcactgaaaaatgtcctttttttttttttttttttttttgagtcagagtctctgtgtgtcacccaggctggagtgcaggagtgcagtgtggcgatctcggctcactgtaacttctgcctcctgggttcaagcgattctcctgcctcagcctcccaagtaggtgggactacaggcacgcgtcactgacgcccggctaatttttgtattttttagtagagacggggtttcgccatgttggccaggctggtcctgaactcttgacctcaggtgatccacccaccttggcctcccaaagtgctgggattacaggagtgagccactgcgcctggctagttttcactggacaataccttgatgaagcagcaaaaattattaattttattacattttgacccttgtgtatgtcttcttaatattctgtgggttaaaaaggggggtatgcatcaagcacttctgtacagtaaagtataatgattatctccaggaaaagcactttcgtggttgggttgcaaactgaactagccacttttttcatggactgccatttttacttgaaactatgacaaactatggttattcagactaaaaagtgtatgaaggaatctttcaaagaaaacaacaggtagcatttgttgccaatgatgaaattttagctttccagtgaaaattaggattttggagaattttttttttttcctcttcggggtagagtttcgctcttgtcgcccgggctggagtgctgtggtgcaatctcggctcactgcaacctctgcctcccgggttcaagcgattctcctgcctcagcctcccaagtagctgggattacaggtgtgcaccaccatgcctggctaatggagaatttttatctgcctctgtgatatagagattggtggtaatatttacagatgccatattttaatatcttataatgaaatgtattatttggaagatctacataaatcagtaaatcaatattttcttttttgtttgtttttgcgacagagtcttgctgtgttgtctaggctggagtgtagtggcatgatctcggctcactacaacctccacctcccaggtttaagcaattctcgtgcctcagcctcctgagtagctgggattacaggcatgcaccaccacaagtgaataatttttgtatttttagtagagatggagtttcaccatgttagccaggctggtcttgaactcctgacttcaaatgatctggccacctcagcctcccaaaatgctgggattacaggtgtgagccaccgtgcccagccaaaccattattttctaaatgatcaatgcatgatataaaatcatgcacaggttaaagatccattcaaagtgcaaaatggaggccaggtgctgtggctcgtgcttgtaatcccagcactttgggaggccgaggcaggtggatcacctgaggtcaggagttcgaacccagctgtgcaatctagtgagatcttacctctacagaaatttaaaaaattagccaagctcccactggagccaaagagtcgaggctgcggtgagccatgaacacagcactgcattccaatttgggcaatagagggagaccgtgtctctcgggggtaaaaaaaaaaaaaaatacagttcattggtagagtttcttaaaggcagccagcctttaagaaattcctggctaggccgggcacagtggctcacgcctgtaatcccagcactttgggaggccgaagtgggcagatcacctgaggtcgggagttcaggaccagcctgactaacatggagaaaccctgtctctaccaaaagtaaaaaattagccgggcgtggtggcacatgcctctaatcccagctactcaggaggctgaggcaggagaattgcttgaaccccggagcggaggttgcattgagacgagatcacaccattgcactccagcctgggcaacaagagcgaaactcttgtctcaaaaaaaaaaaaagaaattcctggctgggtgtggtggctcacgcctgtaatcccagcactttgggaggatgaggcaggcggatcacttgaggtcagtagttcgaaactggcctggccaacgtgatgaaaccccgtctgtactaaaaatacaaaaattagatgggcgtggtggcatgcacctgtaatctcagctactcaggaggctgaggcaggagaatatcttgagccccgggggaagaggttgcagtgacctgagatcgcaccactgcacttcagcctgggtaacagaatgagactctgtctcaaaaaaaaaaaaaaaaaaaagaaactaccatttaccatgttttgatgtagcatcaaagaacaatatctacggttatctagaaagtctgttttggggggagaaaacagttattttccagtaataaaaatatttgtttttaaatgaataattatgtttttaaatttcagtattcatttctaatgtggtaactattgatgagataacctacacaaactaagcctcttaggggccttcagttatttttcaagagtgtgacaagggcctgagattaaaaagtttgaggccaggcactgtggcttatgcctgtaatttcacactttgggaggccaaaggcgggtggattgcttgagcccaggagttcaagatcatcctgggcaacataagaagaccctgtctctacaacaagaacaaaagaaattagccagacgtgttatcacacctgtgttcccagctacttgagtggctgaggtgggagggtcacttgagctcgggaggccaatgctgcagtgagccatgatcacgccactgcactgcagcctgggtaacagagcaagaccccatctcaaaacaaagtttgagaactgttgctatggaaagtctatcaagaaggcacatagggatgtttcttgctgaagtactaacactgaatgatgtctgtgttgtggtgagtagaaaaaaagcaatttgaaaatcattatttatggtatggccccatttttgtaaaacaaaaatatctgtttatttgtgtatgtccaggaaaaaaaagtatggaaggattttacaccgaaatttttatctctagggacttggagctttaggtggaatcggagaaaactttctctttttggtttgtgtgatgttccaagtgtctttttacaacaaacttgggttatcttataatacgaaaaattcgaagatttaaaaactgaggccaggcacggtggctcatgcctataatcccagcactttgggaggttgacacatgtggatcacctgaggtcaggagtttgagaccagcttgaccaagaaggtaaaaccctgtctctactaaaaatacaaaaattagctgggcgtggttgcaggtgcctgtagtcccagctactcgggaggctgagacaggagagttgcttagacccaggaggtcgaggttgcaacgagctgagattgcacgccactgcactcccagcctgggtgacggagtgagactccatctcaaaataaataaataaataaaaataaaaactgaattgatgacagcccaacctgtcacttttttcagatccctttttatgaaagaatttgcttaagttgtgtctgaagacaaaccaattactttggaccctgggtattctttttctaagggaataccatgttattttgtgttacagattgtttgcgatctttcatagcctgatctttctagagttggttaatatccatgtaggttagattgaaaaacttgaattcagaaatgtacggtgttggagcagacatggatctggaagccaagaatagcgttggtgttgttgttgatggtgaatctgaaagagtgggcagatggcaactttttgccagaatcattcagggtcaaagggctagtcatatttacaagggaaaagaggaaaccatgttattaaatatttcatgcaccatatgttcctttcaaatttcagtggcttgactaagaaaattcacttttgggagagttggtacaacaattgaaagcacttagtagtcaactttttccttagtgtttccttcttccttcaacaaacatttattttattgagcacagactatgacaggtcgtgttgtagtcactgatgatatatttgtaaacaaaacaatccctgccctcctagaacttacattctagtgggaggagacacatcataaataagctaagtaaataaaatacagatatgttagtgatatgtgctgaggagaagaataacatagagaaggggacagggaatggggtaggaggtgtaattttagttagggtggctagagaggcctgactgagagggcggcatttgattaaagacccgaaggaggaagatgagcagcaggccctgttgaaatatgtgaaagaatttcaggccgagggaaccaggatgcagaaacctgaggcagagcttgctagtttcaaggagcagcctagaggccactgcaccagagcaaagagcaaaaggagagatgcaggaggtaaaatggagggtgggaagagaatggctgaaggagagggtggccttattggcccatttcaaggattttgactttgattcatatgatgtgggaaggccttggagaattttccgaggggactatactatctgatgtatgtttcagtatgaaatagaatctctctggctgctatgatctgaaggaggacaagggagcagggattccacgggggcattgattgcacagagccaggtaagagtgatgatgcttggaccaaagtggtggcactgggtggagggtcagaaccgacaagatttgctctcggattagatgtgggatatgggggtgtgagaggggccaagtgtgactctcaggttttcgaactgaataactggaagaatagagttgccttttattgaaatgaaggtcgaggctgcagtggtaagctgtgattgcgccactgcactccagcctgggcaacagagcaagaccctgtctcaaaaaaaaaaaaatatttaccatcaggtaaaaccacttatggttctcaaaactttatttaaaataatagacacttgataaatcaacactgtaggccgggcgctgtgactcacgcctgtcatcccagcactttaggaggccaaggcgggcggatc

SEQ ID NO: 235 - DNA, 510 bp, Homo sapiens
tttttttttttttttttttttttggatattcaaatacatttattcaacaataaggccagtcaggcctcgcggtgacctgatgggatttcaaaaccttggttctcagcaaggcccaaatttttgaatgaggatagaagtctggcgtttccgattttcaaaacataacacgcattcattgggataagtatttccatcagtcccacagacagggtcatatattttggggcatccattaagttcattggaacatttggcctctcttcccagggagtcagctccagtgttacctaaaaataaatcagatatggtaagttgggtcctaaatgaaagaagtcagatctattcttcatcagaattctctgctttcattgcagactgggacttctttactaggctctttcattccccaccctttctgatttctctaatcttccaaaagtatctgactgattttcctgtaccccttccttggcaaaaccttaaaaagtttgagtaaaactttgattatga

SEQ ID NO: 236 - DNA, 1897 bp, Homo sapiens
ccacactttgcattctctggtcaccatcctcgggacctgggccctccattcaggcccagccctgctcctgccacgccctggctctggcctggactttctcctatctcctgttcttccgagccctcagcctcctggcctgcccactcccacgcccttcaccaatgccgtccagctgctgctgacgctgaagctggtgagcctggccagtgaagtccaggacctgcatctggcccagaggaaggaaatggcctcaggcttcagcaaggggcccaccctggggctgctgcgacgtgccctccctgatggagacactcagctacagctactgctacgtgggaatcatgacaggcccgttcttccgctaccgcacctacctggactggctggagcagcccttccccggggcagtgccagcctgcggcccctgctgcgccgcgcctggccggccccgctcttcggcctgctgttcctgctctcctctcacctcttcccgctggaggccgtgcgcgaggacgccttctacgcccgcccgctgcccgcccgcctcttctacatgatccccgtcttcttcgccttccgcatgcgcttctacgtggcctggattgccgccgagtgcggctgcattgccgccggctttggggcctaccccgtggccgccaaagcccgggccggaggcggccccaccctccaatgcccaccccccagcagtccggagaaggcggcttccttggagtatgactatgagaccatccgcaacatcgactgctacagcacagatttctgcgtgcgggtgcgcgatggcatgcggtactggaacatgacggtgcagtggtggctggcgcagtatatctacaagagcgcacctgcccgttcctatgtcctgcggacggcctggaccatgctgctgagcgcctactggcacggcctccacccgggctactacctgagcttcctgaccatcccgctgtgcctggctgccgagggccggctggagtcagccctgcgggggcggctgagcccagggggccagaaggcctgggactgggtgcactggttcctgaagatgcgcgcctatgactacatgtgcatgggcttcgtgctgctctccttggccgacacccttcggtactgggcctccatctacttctgtatccacttcctggccctggcagccctggggctggggctggctttaggtgggggcagccccagccggcggaaggcagcatcccagcccaccagccttgccccggagaagctccgggaggagtaagctgtcacgaccctccctctgccagctggtcccgggaattctgtgaaccaggctgctgtctcctccccagaaagagtccttaccttggagagggtcctggagagaatttcctcttccccagctaaataccctgcctgcaactgaagcagacccgggggtgtcctccctgccctctgcccagaggcacctccactcctacaaaatcaaagtattgtccagacaagagtcactggcccctgctccagcttctgggtatccagagagcactgcacttccccaaaacggaaggggcccctgggcagtgggttttgggcaaattccctttctttgcatccacaatgtgggtcggagcttgggggcaggtcctgggagtgggaagcctcttccttgtgtctttcgctccacttttagctcatcgcaccaatattgcagacttggaaggaagcataacttccatttcacaaaggggaaactgaggtgcgggtgcgggcctggggacggccgtcccatggcttccatctgagccacctcgggaccccagcactcctggcgccctcttcttcatcgcttggcctatgacaggtcaccgtgtgtaaatctttcccaataaagtgttgcacaaaa

SEQ ID NO: 237 - DNA, 1673 bp, Homo sapiens
agcccagcactagaagtcggcggtgtttccattcggtgatcagcactgaacacagaggactcaccatggagtttgggctgagctgggttttcctcgttgctcttttaagaggtgtccagtgtcaggtgcagctggtggagtctgggggaggcgtggtccagcctgggaggtccctgagactctcctgtgcagcgtctggattcaccttcagtaattatggcatgcactgggtccgccaggctccaggcaaggggctggagtgggtggcagctatatggtatgatggaagtaataaatactatgcagactccgtgaagggccgattcaccatctccagagacaattccaagaacacgttgtatatgcaaatgaacagcctgagagccgaggacacggctgtgtattattgtgcgagagagggtcggtgggtacgatatactacggtgactactatcggatactactttgactactggggccagggaaccctggtcaccgtctcctcagcctccaccaagggcccatcggtcttccccctggcaccctcctccaagagcacctctgggggcacagcggccctgggctgcctggtcaaggactacttccccgaaccggtgacggtgtcgtggaactcaggcgccctgaccagcggcgtgcacaccttcccggctgtcctacagtcctcaggactctactccctcagcagcgtggtgaccgtgccctccagcagcttgggcacccagacctacatctgcaacgtgaatcacaagcccagcaacaccaaggtggacaagagagttgagcccaaatcttgtgacaaaactcacacatgcccaccgtgcccagcacctgaactcctggggggaccgtcagtcttcctcttccccccaaaacccaaggacaccctcatgatctcccggacccctgaggtcacatgcgtggtggtggacgtgagccacgaagaccctgaggtcaagttcaactggtacgtggacggcgtggaggtgcataatgccaagacaaagccgcgggaggagcagtacaacagcacgtaccgtgtggtcagcgtcctcaccgtcctgcaccaggactggctgaatggcaaggagtacaagtgcaaggtctccaacaaagccctcccagcccccatcgagaaaaccatctccaaagccaaagggcagccccgagaaccacaggtgtacaccctgcccccatcccgggaggagatgaccaagaaccaggtcagcctgacctgcctggtcaaaggcttctatcccagcgacatcgccgtggagtgggagagcaatgggcagccggagaacaactacaagaccacgcctcccgtgctggactccgacggctccttcttcctctatagcaagctcaccgtggacaagagcaggtggcagcaggggaacgtcttctcatgctccgtgatgcatgaggctctgcacaaccactacacgcagaagagcctctccctgtccccgggtaaatgagtgcgacggccggcaagcccccgctccccgggctctcgcggtcgcacgaggatgcttggcacgtaccccgtctacatacttcccaggcacccagcatggaaataaagcacccaccactgccctgggccctgcaaaaaaaaaaaaaaaaaaaaaaaaaaaaaaaaaaaaaaaaaa

SEQ ID NO: 238 - DNA, 42 bp, Homo sapiens
ctgtttttctccttctcttattccatttagtttttcaattca

SEQ ID NO: 239 - DNA, 48 bp, Homo sapiens
agaccatcacggatgccgagcttcgggtaactctcacagtggaaggtt

SEQ ID NO: 240 - DNA, 1743 bp, Homo sapiens
ctgaaggcggaaccacgacgggcagagagcacggagccgggaagcccctgggcgcccgtcggagggctatggagcagcggccgcggggctgcgcggcggtggcggcggcgctcctcctggtgctgctgggggcccgggcccagggcggcactcgtagccccaggtgtgactgtgccggtgacttccacaagaagattggtctgttttgttgcagaggctgcccagcggggcactacctgaaggccccttgcacggagccctgcggcaactccacctgccttgtgtgtccccaagacaccttcttggcctgggagaaccaccataattctgaatgtgcccgctgccaggcctgtgatgagcaggcctcccaggtggcgctggagaactgttcagcagtggccgacacccgctgtggctgtaagccaggctggtttgtggagtgccaggtcagccaatgtgtcagcagttcacccttctactgccaaccatgcctagactgcggggccctgcaccgccacacacggctactctgttcccgcagagatactgactgtgggacctgcctgcctggcttctatgaacatggcgatggctgcgtgtcctgccccacgagcaccctggggagctgtccagagcgctgtgccgctgtctgtggctggaggcagagtaggtggtgtgctgggaatgcgcgtgggagaactgggatggaccgaggggaggcgggtgaggaggggggcaaccacccaacacccaccagctgctttcagtgttctgggtccaggtgctcctggctggccttgtggtccccctcctgcttggggccaccctgacctacacataccgccactgctggcctcacaagcccctggttactgcagatgaagctgggatggaggctctgaccccaccaccggccacccatctgtcacccttggacagcgcccacacccttctagcacctcctgacagcagtgagaagatctgcaccgtccagttggtgggtaacagctggacccctggctaccccgagacccaggaggcgctctgcccgcaggtgacatggtcctgggaccagttgcccagcagagctcttggccccgctcgtgcgcccacactctcgccagagtccccagccggctcgccagccatgatgctgcagccgggcccgcagctctacgacgtgatggacgcggtcccagcgcggcgctggaaggagttcgtgcgcacgctggggctgcgcgaggcagagatcgaagccgtggaggtggagatcggtctcttccgagaccagcagtacgagatgctcaagcactggcgccagcagcagcccgcgggcctcggagccgtttacgcggccctggagcgcatggggctggacggctgcgtggaagacttgcgcagccgcctgcagcgtggcccgtgacacgcagcccacttgccacctaggcgctctggtggcccttgcagaagccctaagtacggttacttatgcgtgtagacattttatgtcacttattaagccgctggcacggccctgcgtaggcacaccagccggccccacccctgctcgcccctatcgctccagccaaggcgaagaagcacgaacgaatgtcgagagggggtgaagacatttctcaacttctcggccggagtttggctgagatcgcggtattaaatctgtgaaagaaataaagaaaaaaacaaaacaaaacaaaaaaaaaaaaaaaaaaaaaaaaaaaaaaa

SEQ ID NO: 241 - DNA, 115935 bp, Homo sapiens
gatctaatcatgcgctgccccctacaggtttctttttggtaaagtagaaaccaaaaaccccaaaaccctacctcccagggtgctttgagagtcacactagatgaaagaacgtaggcaaagcaccacccaccacactaaataaatgaagtgctgctgcttgttattaatgataaaaatgtcatttattattaataacaatattaccaccagtagtaataataatttattaagcttaatatggtcgggcccagtggctcatgcctataatcccagcactttgagaggccgaggtgggtggatcacttgaggccaggagttcaagaccagtctggccaacatggtgaaaccccatctctactaaacatacaaaaattagctggtcgtggtggtgcgtgcctgtaatcccagctactctggaggctgaagcatgagaatcatgagaatagcttgaactcgggaggtggagcttgcagtgagctgagatcacgccactgcactccagcctgagtgatagagggagactttgtctcaaaaataaataaataaaaataaacttaatttgttgttgacatggtataaaataaataaatacataattttaaaaaatgagttagatttgtctagaaatgtttggtaaaaacatagaaattaagtctttaattttcctgtactaaaacaaaagcatattaagatgttcagcccagatttttttttaagttattattttattgtgcatctatccaaagaaaaagtgaaaaggaaatttaatgtaaaaaatattcacaagtcttacaaactgttagtgacatcagataatttttaacaaggaaacataagttgaaggtcaccatgtctttcctttcactttgtaaacaaatcttaactgtaagcagatatgaaaatatttcaaaacatgctgaggaaattgacttgattttgacttaaaaacatgacattttgaatattagagcatgtaaagtttttcttttcttttttttttttttttttagaggggagagaaacttgttcaaaatttgaggaaagtaatagttttttagagaaacattttgttgaagatgactttccagcaggaaatgtgacaatttatatgaaagggactgataggattatgaaatgctacttctgaaacttctatccactttctaccctcgcccaaagatgataggaagtaaagtttgaatattttattttaatattatgatatctgctaatgtaaatttggatttagaatacagattacagtaagattatcatcagttgatatgcattagctaggcagcaactggttctttgaattgcaaatattacacaaatcacaggatgttaattatgtcagagagaaacagataaatttgctttatgtagcagagggaagttcttgtattatggtaactttaacttgggtaaatgttcaggatccagattaatattaaccaaatatataaattatatcaacattagatctctgcaaacaggtcaaaactgattaatctgtttttttttttttttttttgagatggagttttgctcttgttgcccaggctggagtgcaatggcacgaactcggctcactgcgaactcggctcactgcaacctcggccccctgggttcaagcgattctcctgcctcagcctcccgagtagctgggattacaggcgtctataaccacaccagctaattttgtatttttagcagagatggggtttctccatgttggtcaggttggtctcgaactcctgaccttagatgatccacccgccttggcctcccaaagtgctgggattacaggtttgagccaccgagcccagtctaatctgtttttaaataacaaaagaaaacagcgatttgcaaagagcaactcatagattgaaagccctttgttttgaaaaaccaaatcattgtgttttaaaattctttgtgcagtaaagattgatatgccaaacaaaggaattgaatgtcagatgataggcagccaagtcaaaattgcagcttctaggaggtgggcttagtggggcagtcagtgttcagctgaggacactctttcacaagtgggctttaaaatagcaggtcttgatgtccatggtttggtgatttctgagctaaaaacaagattcttgttcacaaccacaatcgggggtgatcaaagactcttggtagctcctaagtggagttcatagggttataataaatagcttaatttccttaattttatggaaatttgaaagatgctaccatgctgcttgaacttgaatattttatcttaaacgctgtgaagtatagatagaaacattttatctgacatagttaatgatgatactaatagagtgaagtaaaattgtttaaaagacctggccaggaaaaaggaatatctgatagtgtatcttggtatcctaatagtgtggactttggatgtgaaacacagttaattccttcagtgcctgtctgttgggcatcttccatctgacgggcattatgtcagggaccgtgttgtgcgaaagcaggtggggtcattgcccagaatgagcctgcagcctcatgggaaagtaagacatcagtacataaataagtgcaaaattgcagtcttgtcaaccgctacaagagagggtgactgtgcactgagagcacagactaggatctgggaagagttgaaatgtcctgagatcttgggatgatgaaagcttaacaagcaaagagggagcacaacctgctcgaagccaccagtgggactggaacccagagaacaaaggcgagcatggtgccagatgagcccagaggcctccccaggagtcgaatcattcagggtgggggctagctgcattttaagtggaaataggggtccaggtgaaggcagcacaatcagatttgtcttttgggaagatcattctggaaagacgggagagtggagggaaaggggccctggggggttgaggagacttgtgcgaagctatgcagtgtttcagatgaaagatggtgtgagtgacgggacactgcagtaagtgcgggggtgcaggaagactcccgggctcccagcttgccacacaggttgggcagtggtgccttttacagagaatcaagtctgcacggagggccaggtgtgcaggccgtgccttcactgacaggaatggcttttctaatcatttccctgatttctgctctttcaaacagggtaacttctttcaaaatattggttccatcaccctgtttgctgtttttgggacggcaatctccgcttttgtagtaggtggaggaatttattttctgggtcaggtaagaaaatcatctttgaaacactttgaaagtcttacattcttagagctagtgcagggaggtgggaaggtgaaatggggccactttgtggggcctgggtttcacccttaaggtaaattccttctggaaggaaatcctagcttcatatgaggcacagtagaggcgtgctaaattgtttcaaagtgtcctccaagacctttggtatctggaattgagtaaaacttttccataatcccccccaaagtatttgagtttatttgcaaaccaatactgtcttaaattagaatacctaaaaatgaagccaaatatatgccatcaagaacttcaaactgtgttgtcaagtagactgaattggggttgaatgctgttttttgataaaaatttgtatttaaaaaatcaaagatgtgcttttctgctggcattggagaaataataaaatcaaaggtgatgctgaatctcttcactcaattctaagctgtctacctgtagaattatatactctggattttccacaattgctaaaccacttcccagtggcaccagttgggtggtctctactttagacttcaaattaatttagaccaaacatccctaggaaggtagtatctgtagttttgtattatgcatgtccatgcatgtcacattcttttcctttattgtcagttgcagaaagtttgcctgtctcagttctgaaaattaagttgagggtcaggtatctgagtgacgggcagatttctttaacacatcagctgctttcttctctcaatagccaaagcccattccattggattttcacctatattgcagctttgatggcaccagaataaatctgtctgtcatgcagctttcttcattgctcagcttctagtattaagtaagaataaacttaaggaaactacagttaattgggcttgaagaatgtagcattcttttccatactctcgttgcatgccgatggaatgcatgtttcaactaaggcttaggagcttttatttttcaagtggtttgggaactgaagattaatgtccttattagttttaataaagcactaatggacatttaaatcttggctgttctccagggttttttttttgtgtgtgtctgtgtgtttgtgtgttttattttacaggctgatgtaatctctaaactcaacatgacagacaggtaaatccttcatactgtaacacccatgcgactgcttttcagacaggggaaatgtttctccacattgcttcctgggtgtggtactgttctattctctctctgtgtatttatttttggtaaggatttctgccatagaatcttactctgagttaatttgtatctctgaaatgaatcaaaagtatcctaaagacttttgaagatccctagtggggcattgctgattggaatgatttagtttaagcttgggagggagtaactctgctcagctaactgccctgcctgtgtgcacgcgtacactgtaccattgtcttcttatttacaagacttttcagtcgccgtaacaaaaagtcttcttgacagattagagatggagagggggagtgacggagaaactttcctctgggattcccacgaagcctgtggtgggggaagcagggccaagacctctattgtggttattgtagaaagcccctccatctgaagccactcccgtgagcacttcccatgagccccatccaggatttcccagaattgcatagtgagaagcaacctcactaggttgaggcagttgtctctcagaaggtaccagatctagtgctgaaaaagtgcccatgctgagcatagtctgggttcccccctctgagagcagacagccttgctcagtgtgtctgcatttggtcttgtgacatggctggggagctgggcagcagggtcacatgttcgtccccagatccttgccatggggccagtcagagctttcaggatttagcagcagtttagcaacttgggactagaatctgggaacccttttcatgggaactgtgtctctgataacaaatccaattctatttctacctccactcaccacccaccccagcccaggacaattttggagcttttgttgtaagacagttttgatacataaacaagtagtcctattccatgagagctggaaataaagcagaactgatgtcctgtgtttggtaggtattttgcaaataaaaagaaatgcccagtaaaggaaggtatcacagtattcaaaccttccacttgttttgggggcaactggttagagatacagacaatgctggataacttcctgtgaagttgaattgaatcagtggttgggatgttcaggtggaggacaggaaaggaattgccctgtagacacactgacttagagccgggtagtgttttcctctccgtgtgcagaagtttcctttgctgttagaaagtgacgatccctcagatggggactgctctggggtcgcaaacccacacagccgcagggcctggcagagcacttaacagagggaagctggccagctgtgagtctagacatggggcagcggccagtgggagaacacaccctgtatgaagggacagccacttctcagcgccaactcatgattaccatgtggaaatctgggcccagaattggtggctattttaaatacttttttttcaaaaagatgctgggtttctagatttttatagggaattttccagtttttcaatgttgacaacttgctcaatttttcacaaataccatgcagaccaaacatgagaggggaccacagactttttgcaacctctgcactgtagaaaacataaaaataacttcgttgcacacgttttgttttgttctagtgatatcttgttggagagagatttcactcttagagatcctgaattatttcgctgccttagttcatttctttttcattttgttaatgttgctatcttttggggctatgggataaagaaaatacatttttaagttgaacttctggcgtttaaaaggcgaggtcttaaagatgtgaagtggaacagctgacagccaggtgaaataaccgtctttccatacagacctctcaatgattcagcagtttgtatttcagacttctcatcttcactgtcagaaatactctgcctcaatttagattcccaagcaaactgtgtaacatgatttatacaaagcatttcccccagccttttgtttgttttgtttttttcagttaatttagaaagtttattttgccaaggttgagcatgcgcacccgtgacagcctcaggaggtcctgacgacatgtacccaagatgatcagagcacagtttggttttatacattttagggacacatgagacatcagtcaacttatgtaagatggacgttgccccaaccttttattatgaaaaattttaaacatacagaaaaggtgaagcattgtgaagtgaatacccataaacaaatttttaaaatataaaaggtgtatcctgcaggggtaggagaggcacaggacagggaacttgggagcctgtggtgggcctgcgcttcactgaggctggagtatagtggcatgatcacagctcgctgtagcctcaaactcctgagctcaagctgtcctcctgcctcagcctcctgagtagctcggactacaggtatgcggcaccacttccggctaatttttgtgtgtgtagagatagggttctctctatattgcccaggctggtcctgaactcctgagctcaagccatcctcccacctcagcctcctaaagtgttgggattacaggcgtgagccactgtgcccggcccaggatacactttttagacatcatcctccttccttcacggcctctggtgatggggctgtggttgatgagagtgaaaataaaagagcgaccagaagctctgtctgggttgtggtgcaagggcctggggaccagccaccaataaaataggatctcccagatgggcagttgtttagtggagttaccttccctttcttccttccctttcttcttcccacctgcctgcctgcttgccttctgcaagtgtctctgggccatgcccagtacagaccctgggaattcacccatgacgaaaattcagcatccactcccttggagctcacaggcctgtgatgacctctgtgaggacaggcgaagtctgggaactgaatcctcagcctgggatccggaggcactctgggttaatgcgcatgagtcacattcacaggcagctaccatggaaaccagaggccagatgattgacttctgaagagaactgtacctggcaaggcagccaggcatttcctcagtcagctctcctctccctgaccctgcagccaaaagatcacccattgaaggctgctcagccgagcatccttttccccctagacccaggcttggtgagggtgggaagctcagggcagtcgtctctggctgatgactgacacaggctggccattgggtctccatgttttggctggtgttgtggaagggggcagacccaccattctgctgccctggaaagaaagttgcaacaggcatggcacagaggcttgtgggaaaatcaccaaagggcagggagagtgaattgtccaggctcatgtggcacatgaggccccttgagggagctggtcctgcctccctcgccagcctcttatggctcctgccactcaccccacccccaccaccacatgcaccttccttctgttcctcaggcagcaggcttgctcccaccgcaggagtcgcttgctgtcacctcagcctgcagctcttggcctggccagctgcttcttaacatgtaggttcttgcttacatgtgtcatcccttcacagaggcctctccagaccgccccatctaagtggctcccacacccacacccccaccccaccttcccacgtcacctcaattgatttcctgggtcacatgtggtattgtctgaatttgccttcatctctgggtattgctgtatctactgttgggggtaggagtaccgactctgggcagatagcctggctctgctacttgttagctgagtgaccttggacaagttacttcatcatcccgttgtccctcggttttctcctctgtcattggggcagtagtagcagtctcatacagtcactgtctggattgttgagtcaccgtatgtgaagtgcttagaacagtgccggccatggtagcctccattcctgaaacatgttagacaatcagcacatatctgctgggggtgataagatcttcacggggactgtcagtgaggtcactggcccagttgggagatggcctcagtgtttctctcggctgtctacgccactcacccccaaagcacactggggttgctgctgctttttgacactttcttagatcttgcaaatctgagtgcaggctggggtcggtcacggacagcattccaaggggctggtggcgaggggcagagcagaggtcagatgcaggagctcatgggccatttggctctagctgctctgacccgtggaactgggcggtgtatgataaatatatctaagcaaaagtctcccttccatcattggtcaaagtcaagtctccgtgctgacactagaaaaccaggccattcctaacaactcagtttagagtgggcctttcatactccacccacaaaacagcagataagtggggaaaaaatacgctaccttctgtaattaattcagctctagcgtgtagtattgctttctgttaaatatggcctttgactttaatgctttaatatgtggaccaagtgacacacattacagaatctccccttccctctgtctcttacagttttgcgtttggctccctaatatctgctgtcgatccagtggccactattgccattttcaatgcacttcatgtggaccccgtgctcaacatgctggtctttggagaaagtattctcaacgatgcagtctccattgttctgaccaagtaagtacgggggcagagaacagacttttttcatgtgacagaactaaaggtccttgtaacaaaggggcagatatttccacacagcatgtgtacagttgcttgtcctctgggtgatcagttcacccactctctttctctgtatttctgtcctgacaagccttgatgtgctgcaagaatatggtcaggttccaggggtggttaaaagaggagagtccacctttttttttgagacagggtctcgctctgtcacccaagctggagtgcagtggctccatcacagctcactgcagcttcaacctcctgggttcaactgatctcccacctcagcctcccgagtagctgggacttacaggcacgtgccatcacgcccagctaattttttaagaagtttttgtagagatggggttcgccatgttgcccaggcttgtcttgaacccctgggctcaagcagtttgcccacctcagcctcccaaagtgctgggattacaggtgtaagccattgctcctggctttgcccacctttttcgacctgccttttagtagtggtttctgagcccagcttgtcaacatcactgagggtgcttattaagtgtgacattcctaggccccaccctcagagcttctgattcatttggtctggggtgagtcccaagaccatgggtttttaataagttccccagatatgatgaagcggcctgttcaggggtcagtgtttgggcaatattattggcaacaaaagcaatagacagaggccccactagctgatgcatgtcaccttccttttcacagctttaaaataaggtaggaatgctgataggtgccctgccttaagatgctattgtgtaaactctactttggacactacaatttgttttcaaatatttgttggtattactaccctaattgatgggatctgagaagttaaagatgaataataaaatgtcaagaagtcattgggggccaggcgcagtggctcagtcctgtaatcccagcactttggaaggccaaggcgggtggatcacctgaggtcaggagttcaagaccagcctggccaacatggtgaaaccctgtctctactgaaaatacaaaaattagctgggcttggtggcgggtgcctgtaatcccagctactccggaggctgaggcaggagaatcacttgaacctgggaggcggaggttgcagtgagccgagatcacaccactggattccagcctggtgacagagcgagactccgtctcaaaaaaaaaaaaaaaaaattttagctgggtgtcatatcacgtgcctgtattcctagctactagggatgcagtgagctgtgatggagccattgcactccaacctgggcaacagagcaagaccctgtctcaaaaacaaaacaaaacaaaatcactgggaaaagtaaatgcatttcagataatctcaaatatatttttctgatgcagggatatttccttgaactctgcattttatggtggtcattaacaggcaggcaacaaacccaaagatttttgccaaaacacagatgtttgagaccagtctggacaacatagcaagaccccattctcccaccttcccgcaaaaaactccaaagcacgtggagaaaagagccccggataatgtatcaaaaatgagctaagagaatcttagaggccagtgtgtgttctgttagataatagaatttccatttacctgaatactgacttactgcctttgctaaagcataaccactctgtggtagctggcattttcttagaagtttttttatagactatattcagaattcttatgttggaataaaatgcctcagcctaggactagatttgaggactgaatagttaaataaggtactacagggctgggcgcggtggctcacgcctgtaatcccatcactttgggaggctgaggcggatggatcacttgaggccaggagttcaagaccagcctggccaacatggtgaaaccccatatctactaaaaatacaaagattagccaggtgtggtggcgcacgcctgtaatcccagctactcgagaggctgaggcaggagaatcgcttgaacctgggagacagaggttgaagtgagccaaactcacatcactgcattccagcccgggcgtcagagtgagactctgttttaaaaaaaacaaacaaacaaaagggtactatgagaaaagcatccagcattgggtaatgtgacatcctttccttttctttccctgcccctagttgttgttttcaccacatttgcccagtttttgccctgtttttgcccttcctttgcaggaggagcttaccaaatactgcctgatggcaagaggtgctcaacaggccttaaaaaacaaccaaacttataagtatttttgttattctaaatgtagtacatatattcttaccaaatttaggaaatacacaagcaaaaaagagagaagtatcacacacattgctactacctagagataattatggttgataatttggtgtaaatatatatacattttatttcaataggcttataccccaaatattgtactctattttccattgaacacaattgataaaacagtcttctggaaaataattttactggttacggtgtattcctttttctgggtttactatgatctacttaaccagtttcctactattggctttttcatgtttctcttggcagaaatttctatagctttattaggatattatccaacatcatgccacaagacctttaaaaaatccaatggcagtattttttcttatttaagatctactctgaaagctgcctagcattctggtttttacttttatctcgtatcctggctacacatattgaacatttgtgacaaggaattttgcctaacttggaggtgacatcatgagttatttttatgcattgggagctaaactcaattgctttgtctcttgatttttttaaagaaaaataatttttcagaggtaggatcttttctgagcttttccagttgtctctattataaaagccaaagataggagactttttctatttaagatgggaaatgatggagtcatcgttggtagccagaggttcttactggaaaagtgctttggaaacccaagatggggccaggcatggtggctcatgcctgtaatcccagcactttggaaggccaaggcaggtggatcacctgaggtcaggagtttgagaccagccttgccaacgtggtgaaaccctgtatctactaaaaatacaaaaattagcccggcatggtggtaggtccctgtaatcccatctacttgggaggctgaggcaggaggattgcttgaacctgggaggcggaggttgtagtgagccgagatcgcaccactgcactccagccagagcgacagagcaagactgtctcaaaaaaaaaaaaaagaaagaaaagaaaccaagatcgtctgtggtaacagttcccacagttggatctgtggagcatgcatgtatagtttccagtctcctcgtccaccagcagcagtgctactgctgaggccacggttggatctgtggagcatgcatatatagtttccagcctcttcctctaccagcagcactgccactgctgagacccaagctggcttgagaatcagcctcacaaactctccagccacggctggtcatctgccatcagcatttggtgagggacctctgtgtgccagacactgctgagagccaggtggatttgacagtcggtccatgatgggcaaaagatgcccgtagagaagtgaacatggtgccttaagcatgagggggctcaatgaccagaccatgaaggatatgaggaaggcttctcagaaggaacgtcttgtgagccaggcctgggaggcttattttcagacagaagatacagaaaaggggcatgtcagacttacccccgcctccccctccacctttttttttttttttagtacagaagaaaaatatgctcctgggagctgttgtcacctttccttggttatcagaatcatacctggttttgaagaggtatacttcataaacgatcatctccaaagtgagctgacacatttatctttgcaactgaatatgtaaatgagttaccccctttttgatgttgttaccttcatgaatgccagaaagcaaatgtcttctgtttcttcggtaacttgaattcattttcagctttgatttgttgctatgatagtgtgttcttaaagtcactgctgtagaggaaaccttttgttttctccagctacagcttaagctcatgaaatggaccctgaagcaatactcccttttattctttaaggtatgagaaacatgaccttaagaaacaaaatgtagaaaattaccaggccagaaagagtccaaattctactttcattacctggagttcagaaaccattgccccagccctggatctgctgttaaccctttgtgtgaccttacccagtgactcactctctttgggcctcaggctactctgtataaaaagcagtgaaaccagcctgggtacctgctgtggtagtgatgtgggctgaggctgggcactgtatgtgtgtgacctgcagatccatttttgggaactatgggtgatcatggccttcaaaagcacttttccaatatgagcccttgttggctgccacattcctcaaggtgggatgttaacctgtgatctgctagaaagaagggggattggggagattgtttgttcagatgagtctgcaaagctttcacgtgaagaaagttagatttcttttttgcaagacttctcagacctttattatgttattttgggctgtgaatttcctcgaaaggctttctgagtttatttgaccaagctaccttttcatcttattctgctttaaaatgataccaatcctggggcctggcatggtggttcatgtctgtaatcccagcactttgggaggccaaggcaggtggatcacttgagggtaagagttccataccagcctggctaacatggtgaaaccccgtctctactaaaaatacaaaaaaaaattagctgggcacggtggtgcgcatctgtagtcccagctacttgggaggctgacgcaggagaattgcttgaaccctggagacagaggttgcagtgagctgagatcgcaccactgcactccagcctgagcaacagagcgagactccatctcaaaaataataataataataaaatgatatcgattcatgacatggtgattgatgaagctgaatattactgttgactattctttgtttcatttactgagtcaacaaaaaggtattgactgtcttttgtgtgggaggctctgctttaagccccggacataaggcagcgaacaagatggacacaggcttcatcctcatggaatgaggcacgacagtttcccatgctgtgaaggagaagtcaagcaccatgacaacctttaaatgggcaggcctgcgtgaagggatcagggcaggtgtgcctgagggagtggcactgaccctgggttctgagggatgaataagggagttagctggggcaaggaaaagtgaatggtgaccacctgggaggtgccagtgacagtgtggcccagatgtttagatttggggagaggaggtaaggtcagagaggtatggcaggcaggagccaagtcaaactaagactgggcttcctgataacgtcgggaaactgtgagttctgaacaggctggtaacctgatcaggtgtgcctttgaaaaggatcagttagggcctgtatttctagcactttgggatgttgaggcaggcgaatcacttgagcccaggagttcgagaccagcctgggcaatatggtgaaatcccatctctacagaaaatacaaaaactaactgggtgtggtgatgtatgcttgtggtctcagctactctggggctgaggtgggaggatcacatgagcctgggaagcagaggttgcagtgagctgagatcatgccactgcacttctgcctgggtgacagagtgagaccctgtctcaaaaacaaaaagagggggatcatctaggccactgagtggacaacggggttggtctgtaggaaggcaaggatgtctagaaggagatcagtgagacttatccctgggagtaaagggcagtaggggagggaagaagggaatggatttgagagacacgaggaggatatttaatgagaataactcgatgttcatggtgtaatggttttatctttaaggacaaaaccaacaattgaatttaataacatctgacattttactttgttctgttacagtaaaaggaaagttctttctttcatttcttcctccttaatgtctcctaaatcctccctctcagcctgaaacctcggacatttcttctttgggtagctccattctaatctgacttgccatagcctcaatttcaggttttatcacaggatttctgtactgaaatccttcctatcgactccccaggccttcaagctgaaataccagcacctttcctgggctctttcctgtccctctgccactcttctcaccttgcctcctgccactgtcccacccccaccccaccgctgcgttttagctgcactaatcttggtacttgaaagttcctacaatgggttgcatatgcatgggctctcttcctttgcacatgctgttccctcactgggtgccttcccccatttcttcacctgggcaagtcgtctttatcccaaatctaaacccagcccccggccttttttattttttatttttttgagacagagtcttgctctgttgcccaggctggagtgtagttgtgcgatcttggcccactgcaacctctgcctcctgggttcaagcgattctcctgcctcagcctcccgagtagctgggattacaggcgtgcaccaccacacccagatagttttcgtatttttagtagagacggggtttcaccatgttggccaggctggtctgaactcctgccctcaagtgatctgctcacctcggcctcccaaagtgctgggattacaggtgtgagccaccacgcccggcatcagcccacattttctcaagcaccttccttgagcccggccagtctgagttagttacctacccaccctgcttttctacagccctctacccctcccgcggattgtcattagtgttcatcttgtttttctccctcattagcctgaggggaggagctccttaagggcagcagctttgctctcatctctgaaccccagaaaataacagtacctgggacaaagtaggtgaacaataaacgtttggctgactgaatgaatgatggtatgaatgaatgaatgaatgagcgaataagcaagaaatgttttaagttaatttctaagaactttgtgtatataacattttaatttatttctgttttctttcatttcctagcacagctgaaggtttaacaagaaaaaatatgtcagatgtcagtgggtggcaaacatttttacaagcccttgactacttcctcaaaatgttctttggctctgcagcgctcggcactctcactggcttaatttctgcattaatatccttttaatgtgatgaacatgcagggttaaaattattcctgataacttctgtctctagccagtttctcctgttttttaagggggccaattttagatgaagattttgcttaaaggaggatttttttgcttagtttttgtttgagaaacactctaactcaaggattttttaatctaacgtgaaatttaggatgtcacttttcaaagtttaaaaaacatgtacactgttggatatcagatgtgattttggggacctctcagttcccagagtatgataaccacactccgatgattttcgttttctgccatcttacttttcacatttggaaaactggaaattaattttctttgaaaatgtcaaatagaccaggtgcagtggctcatgcctgtaatcccagcactttgagaggctaaggccagaggattgctttcgcccaggagttcaagaccagccttagcaatggaatatagtgagacctcatctctaaaaaatacataaataaaaataaaatgccaaatagagaaaatttttatcccactgaaagtgtttatccagaaggattgcaaaaggggctttcaaagtgtgttccattgagttatttgcactgattttgttgtttgacaaccaataagcttttccagctggagatggaaagaggcttgttaaggccaatgtcacctttattgctgtagaaatttcattatgtttaaaatagtaacaggcagtagaccacttcggtgcgcacctaagcctacgtctcagggagatggccacctggcccgcctccacgagcagtttgtgtcacagatggccggaagagactcttttgcctggttacaggcatgtttttctgccatcctgttgaattttcccatcaactcctttgtccagaagtctaagggctctattgagttggctgacagcttctcatattgtaccaataaacagaatggaaaagaaaattttttccagttcagtattttcctctatatttatctttttctttaaaaaaaaaaagtatctatcaaaatgaagtggagcaaatgggtactgtgagctccagtataggcattgtgaatgatgtttcaatatatagaaggctctctcctttcacaggggcatgagtttggaaatctccaggaataggaaatactgtgcttcaacagggcctcgaacctcagtttgaacagcgattctcactagttgtctttgactcaaaactgatggggaaagcaagatgggtagcattagtgatctcatccgatgttgttggaggagtgggggtgatgccggccctgggaggaacctggccaagtgagctgtccttggtgtgtctgcagccccagctttgcgccatggcccggcacatccccagccctctaagtcagcgtttttaaatgagttgacttaggttgattttcatcttccaccaccatttatctccggaatttacatttcttagtgttttgtcagattccctttcttatagcaacagtctccctacaaaggaaaaaatccataatgacaaatttccatttgtaaccttgggacattctaaaatctatatctgttgtttacttcatatatttggaaagcagcagttttgtgacttctccacatctcccatcaactctccctcgattctccttccttgacagttgtcatttacgtgctgaagcatattgacttgaggaaaacgccttccttggagtttggcatgatgatcatttttgcttatctgccttatgggcttgcagaaggaatctcactctcaggtaagtgacagagagcctgaaagtgctgtggtgatggcatcttgtcctgcctggggaaagaggctttgtcagttgggtcacttttagtcacaagagacagtcacaactcagaagagcttaagtaataaaggaaatctattggttccctagaaacacatctggatttaggcctgcctggatccaggggctcaaacagtcacattggtgtcacggtcacattttctcttaacccgccttctctcatttagcccatcagtcctgtgaggctccctcagaggagggtagccttgtaggagggaggtactgtgaaggtccctgttttactgatgagaaaactgaggttgagtgagattaagtaaattactcaaggtcacagctgggattggtggaacaacgattcaaactagttgtcttggagtcaagaactagtgcttagaaccctctaatacaactccctccaaaacagatcatcatgaaaccatgtactcagtgctacatagagggacaagcaaagtgtggtggtggcgtaatgttgggcgtttattggacacactttaccagtattcagtttttttatgctgataccagccctgtgaagtaggtactaagaggttgtcattagcccaaagctgcactgcacaagcagtggtggtagtgagattgacagtggaggcccagagccttttccctgcaccccattggaggagggcacacagctctcagcagcagagacgactctgatgcggccctagaagatgatgctcaccagctggaggaggggtggccagtcacagcgtaatgatcttggagccgtcacctggtaatcactcagcagcccaatcaggcttggcttagttgggctttctgcctacaagtggcagtcaagcttgcgtccacagcttgttacgttgtaaggatgttgacctgaaaatggagcgtgactcacccctgttcctgtgtgagggggcagccagttgggaagggctctgccctggaagtctgatcccatcctttgagtgaaggcccttcagaggccttgttctggaaaggaggcactattgcagggatgttttgatctgtgccacaagatggcagagattttcttttttattaacttcgttgaggtataatttacacacaatacatggacccgttctaagtatatagttccatgaatttttgcaaatgtggacagtcataactacccccacagtcgaggtgtggcatattcttatcgcccagtgtggctcccctgtgcccttctgcagtcagtccacctgcctgtcctgagccctggcacccactgatcctgcactgtcattgtagtttaaatgaaatcatgtggtacgtagtcttttgtgtctcctctctttcagttacgtttttgagagacatccgtgtttttgcgtgtggcagtagtttatcgttcttattgcaccacagtttgtctgttcatcatttgaagggcatttggggttttccagatttgggctaagaacagtgtgcatgtgttttcatttatcttgggtaaatacctaggattaaggctgctaggtcatatggtaagtacatttttacttttttagaaactgcctagtgtttttcgaagtgactgtatcattttacattcctcagaatgtatgagagagtgccagttgcttcatattgccaccacacttattttaatttaaaaaagtttagctgtcctgataggtgtgtagcaactgcatttagatgtgctttggtgtggttatttttatattcgccttgggttcattgagttttttgggtttatagtttatatgagtttatagctttcatcaaatttggtaagcttttgcccatttctttatcaatatttttttgttccgccttcctcttccccttgagacttcagtttactccagttatgagaggtagcatgctattggcccacaatatgctttgcctttttttctttttttccctatgtgcttaattttggttatttcctgttgccgtatcttcaaagtcactgatcttctgccatgtggaatctcctgctaatcctacccagcgtatttctcatttacatattttataattcatctacagcagatccctttaggttattttcatttcttccatttctctcttcatcatgttcatgttttcttctatattctggagcatatgaaacatagaaatttctgatagctgttttaatgtccttgtttgctaattccgtcatctctgtcaactgtaggtctgttttgttgttgatttttcttgtgcttataggtcacattttcttgctctttgcttgttattaagttttgattggatgtcagtcattgtgaagttttatgttgttgagcacaagattttattgtattcctttacggagttctggacttttcttttaaaaacaattttttttgtgtgtgtgtgttatttctggacttttcttctggcacgtatctaagtctcttgacatcagtttaatccttcttgaggcttacatttaaacttttttagggctggtgcagagtagcagggccctaactaaggtgtctcaggtaccgtgagctcactccactctggctggtgggaacgcaaactattcccacccatgtcagcttctggaattgttcagcctacttctttttaatggttctttccccagcttcttgtttcatccgacatatttactgatcagtatcagtcaaagactcaaggggactttacagtagatgtccaagagctctctttctgtgcagcttccccgactcaacaggacagccctcttaaagcctcagcctcaggcagtcagctcagcagggggcctagggaaagagtggccacctttgtctcccttccggcaggaatcacagtcctaccctatcttttgtcccatgtcagaaaatagttttgtttcatatcttgtatcaggttttctagttatgtagagcaggacagtgttctgtgtagcagtaatttcttcagacgcaaagctgaaggcccagtggtctctagtgactcagttgacagaacttttctacccagtcgctatccggagtcacacttgggtgctgcatgagcagcacaaggaggaagcagagtggactcaccattttcagggttttgtttttcatcgcagaccagttcaccagggtaattccatcctggtgtctgccatgaggttccctttctttactgaatgttggcacttacaaaaacgttacctgtgagtcattcggctctagcctagctatttttacatctgtttttctaaattgttcctctacccccttgagaagatcattgagtacctgttggcaaagatgtgtttcatgcatctgtttggaatctgtgattaaaataagggagtgtttttcttaccttcttttcagactggcagtgtttcctgttgagaggggtttcatttccttagggaccttgctccacacacagcagtgcaagccaggaacaccagatctgcctctgggtgagggaacctgctctgtccgcactttgccttttgggtatttgtcacgcagggttttcagagaggggcaggatggccctgtgtggtgtgtggacgccccacattgcactgtgaaagcacagatggaaagggtggtttctgctgtcttcaccttcctttgtgtgctccccttttcctgactatcacaaaggactgatctcaagtggttcccaagaccatggagcaggacattctcttcctaggaagtgggaattatttacctaaatccacatgtagggaacacagttgctaaggactggggctggataacagacagacttggatttgaatcccagctccacctcttattggctgtgtaacctcagattacagacttaaccaccccatgctctacttcctcattataaaatagacaaaagggccagcctgacgcctttgctgaggagtggggagcgatgcaagtgagagtcctgatggggcatctgtgccactgctggggtggccagaagtcctggtttgccctctgtctcaatatgatgaattaataatatccccgtttattctaaaaaatgtcctggtatccacagcaaatcaaacagtctccctaattataactcagcaagcgttagctattctcagaatatttgttctgactgtatccatgttaactatttttattgttcagtcaagccagttttgagggccactttggcctctgacactaaagattcaaagatgaatagaccccacttaggcagagcagttagcgaacactgggcttgcaggggatgggagagagtgacactctgtcaaggtgagtcacagaggaggggactttgggcttgaaggatgagtttgcaagattaatcatgagataacactttctttctttctttctttctttttgaggcagagtttcgctctgtagcccagtctggagtgcagtggtgccatctcggctcactgcgacctctgcctcccaggttcaagcaattctctgcctcagccttccgagtagctgggattacaggtgcccaccaccacgcccgactaattttttttttgtatttttagtagagacagggtttcaccatcttggccaggctgatcttgaactcctgacctcgtgatctgtccgcctcggcctcccaaagtgctgggattacaggcgtgagccaccgcgcccggccaacataacactttcttaagatgttggcatgggccaggcgcagtggctcacacctataatcccagcactttgggaggccaaggcaggtggatcacgaggtcaagagatcaaaaccattctggctaatatggtgaaaccccatctctactaaaaatacaaaatattatctgggcatggtggcacgtgctggtagtcccagctactcggcaggctgaggcaggagaattgcttgaaccagggaagcagaggttgcagtgagccgagatcctgccactgcactctagcctggcgacagagcaagactccatctcaaaaaaaaaaataaaataaaaataaaaagatactggcatgaagttggccaaagatagaatgtatggtgcagtgctcttctgcacagatatctaaggaattccattgcagcactgcttgggagagaaaaactggaaggaactatatgttcatcagtaatggaaaagatcaaattccagtccatttgcactatggaatcctgtgcagctacttaaaaaatgaacttgacctgtctgtactgccatggaaagaatttgacatattgttaaattttttaaaagtaagttgaaaaatcaaactctcgcccattcaagaaatacttattaaatgtccaccctatgctgagaactatccttgctgttggggctacatttataaacaacacaagatcagtttccttttcttgcagaagaaagccagaatttaagcaaacccatacaacaattccaggtggcaagaaatgacaagaagagaaattaaagccatgtgacagagagtggcatgtggtagagaatggatgggatctcaggcagtcagggaggtctcccctggaggtggcactggagcccagacctgtgtggcgagaggagccagcccagggacgctctagggaaggagggttttggcagcaggaactgcaggagccaggggtctgaagatagatgtgcgggagtgtggcatgctccaggaagagaaggaagaccagtgtggccaggacgctgcctcacaggttctgcaggcctgagaaggagctgggtttctagtatatgcaccacgacaagagagttggaagcccttgaaaaaaaatcactctgctggtaataggcaccatatatgtgataggatcctgtttattactttagttttattttattttaattttattttttgagacaggatcatgctctgttacccaggctggagtgcagtggcacaatcacgtctcactgcagccttgacctccccaggtttaggtgatccttccacctcagcctcctgagtagctgggactataggcacgtgctaccacacccaactagttttgtattttttgtagagccagtctcactctgttgttcaggctggtctcaaactcctgggctcaagcaatccacccactttggcctcccaaagtcctgggattacaagtgtgagccaccatgccaagcctattactttaaagataaactttataatcacatggtaaaagaactggcagtctgcatattgaagtgttaatagtagttaagagtagttacgtctgagcgggcagtatgaatagattgtcttttactctgtacctcagtgagtctgaatgttttatggcaaaatatgtttattattgagtaattaacacagcgtactcattacggtttcactcagccctcaagaagtatgttatattttacatacagtaaggcacggtacagtgtaaattgtaccatgataccttttcactgccttttggacttgaatcccatactgtcttcctttattacatctagaacagtggatgtaaccataaacagaagtggatttcctctctccctttcttttctgccattcttccttcaggaggctgaacgcttttgctgcatttgctttcttaaacgattttgcctaattcttaaaggaaattcttccttaagcgtattttttcaaataccatgccttttacctcacttaaaaaagttatcctggtttgcaccaacccccgcttttgtgtttctgtagcctgctccactggccgcagatgagggtgatgtgggtggtggagagtcccctttgcttctggagggcatatgaggcagatacttgagccatccctctggcttttgtgcctgctgctgaccctctttcctttcgcctagaactcaaggtgccctgaccccacactagcccagggtaaagccctctgggattgtccagatggcccagtgccaacagtgggtcaggtgcacaggtggcagctgtggtccagtctcagcccccagacagggcttacttatccatatagaaaaatccaaaatgtttgaatttgttgccatccttaaagatggagatttcctgtaaggaaaaccagaaggaagactggtccatgttagatcctcagtcccacagggctactgtcagcctttgtagacaggctgagccgagactgcgcctctaatcccagctgcttgggaggttgagacaggagaatcgcttgaacctgggaggcggaggttgcattgagctgagatggcaccattgcactccagcctgggtgacaagagtgaaactccatctcaaaggaaaacaacaacaaaaacactcttgagcttcaaagagccctaaaggagcaggtaaagaagtctcctaccctctcattttccttcgcccaccatgtcaggtgtgtcttacaggaagcatggctggaatctccctgtaggggaaactgaagagcaaaggcatttgctgtttcctaagagggttaggagatcaaatgtccagctcctgctgtcactcagccagcccatacctgctggggcaatacaaaaaagtaggtttcctatattttgtagggtattgtgttacagtaagcttagcagttgacaagtctgtaatacagtgctgtgattttcacccttttttttttttttacagttttttgtttgtttgtttgtttgtttttgagacagagtcttgctctgtcacccaggctggagtgcagtgccgcaatctcggctcactgcatcctccacccctccaggtttaagcagttctctgcctcagcctccagagtagctgggattacaggcgtgtgccaccatgcccagctaattttttgtatttttagtagagacggggtttcaccatcttgaccaggctggtcttgaattcctgacctcgtgattcacccgcctcggcctcccaaagtgctgggattacaggcatgagccaccgcgcccggccgattttcacccttttatacgtggaaagtttgccagatagtcactgtttccacaaaatggcagaagtgaattaaaactttgcttttaaagtttgacttggaattagtatatcttggcagcttatttgatgattttttaagacaatctcagcttccttacatgaaatagagacccctttcctgctccctatgcagggagatgctgagaagagacctgtgagttcctcaggagtgactgagggcagcggacgaatgtcgaggctcaaatcctgtgtaagcacagaaggttgtacacaccctcgtgcagggctctgaagaaaagatgcattacctttttaaataacagtagttcatgattatgggaaaattcaaagttaaggaaaagtattttaaaagtccatcaaaatccacacatttagctgggtgcagtggctcacacttataatcccagcactttgggaggccgaggcaggttggattgcttgagctcaggggtttgagaccagcctgggcaacatagtgaaaccccatctctacaaaaatacaaaaattagctgggcgtggtggtatgtgcctgtggtcccagctacttgggaggctgaggtgggaggattgcttgagcccaggagatggaggttgcagtgagctgataccacgccattgcactccagcctgggcgacaacgcgaaaccctgtctccaaaaaaaaaaaaaaaaaaagaggccgggcatgttggcttacgcctgtaatcccagcacattggcacaatcctgaagtcaggagttcgagaccagcctgactaacatggagaaacctcgtctctaccaaaaatacaaaaatgagctgggcatggtggtgaacacttgtaatcccagctacttgggaggccgaagcaggagaattgcttgaacccaggagggggaggttgcagtgagtcgatttcacgctattgcactccagcctgggcaaaaagactgaaactccgtctcaaaaaaaaaaaaaaaaaaaaaaaagaatccacacattctccatacacagattcttaggctcctttctgccccccagagtggtttgcttgccacccttatatagtcatccctcagcatctgtggaggatcagctgtaggactccccacgtatagaaaattcataggtgctcaagttccttatacaaacggtgcagttggccaggtgcagtggctcacacctgtaatcccagcactttgggaggccgaggtgggcagatcacccgaggtcaggagtttgagaccagcctggccaacatggtgaaacctcttctctactaaaaatacaaaaaattagccaggcatggtgatgcgtgcctgtagtagtcccagctactcaggaggccgaggcaggaggatcacataaacctgggaggcagaggttgcagtgagccaagatcgcacgcactattgcactccagcctgggtgacaagagcaaaactctgtcccccccccaaaaaaaagggtgggggggtagtgcagtgggccctcaatagccacaggttccacatctgccaaccctatccctggatgtcagtgatggtccacacctttttatctttggtgctgtgaaggggactttacatggcttattttcactcaccctcctaacagttctgtgagtggctactattagtcccactgtacagaagcggaaactgaggctctgatgggggatgtaatgtggctcaaggtcacccagctagtaatgaggctgccagagcgaagggacccatagtattttttctgaagcctctgggaggcttcaggaattcatttattttcctttttcttaaaccctctaatgctctaggccccagggccttgcaggcattgtgagatctgagttggggatcacacggcagtgctttctgttctgttctctccctctctaggcatcatggccatccttttctcaggcatcgtgatgtcccactacacgcaccataacctctccccagtcacccagatcctcatgcagcagaccctccgcaccgtggccttcttatgtggtgagttctgcttctgtgtggccgtgagcaggcccacccagagctgatcttgcttccttatcctgtttgagaagtcagttgagactttccctggcagcagggcagcagctcctcagagccagatccctcactcccttatcttttgtttgttcctctggctttgaaatttcataaagtaaaccaaacacctaataaatgaacatctggcgcctacaatttaaagaccaaaaatagtgagaaccaattatgaacatttgatacatgcatttttaatgtattaatgtgacatttccaaaaatgtattccttggaaataaaatattaatgatggtttggtgaaaatggctccatagtcaagcaaggcatggggctcacacctgtaatcccagctgcttgggagactgagaggatcacttgagcccaggagttcaaggctgcagtgggctatgatcttaaaaaaaaaaaaaaaaagaaagaaagaaaaacaaagcttttgtagtcaaacaagagtttaggaaatcctggttaaataaagtttaacatttatgaattgccagacttttcagcaaataatggattgtcaaatccttaacgggggatatagttatagaattttccaaacttgtccacagaatcctttattcacaagagcagcctgagggacatcactcggggacagttcgcagtagaggtgtcatttgttgggctgggataaaccacgatggctttgtctttaagcagtttgttcaagttcttgttcccccacgctccgacatacccatgtatctccccaccaactttatacttggaagtggttggagtcggggaacagctctcaccatgtccctttaagctggcccccaagtgactttgccctagctgtcatcaaaatcacccctggcattttgagggacttgtctctttttttttttgagatggagtcttgctgtgtcgcccaggctggggtgcagtggcgtgatctcagctcactgcaagctccgcctcccgggttcatgccattctcctacctcagcctccggagtagctgggactataggtgcccgccaccatgcctgactaattttgttttttgtatttttagtagagacagggtttcaccgtgttagccaggatggtctcgatctcctgaccttgtgatccacctgcctcggcctcccaaagtgctgggattacaggcatgagccaccgcacccggccacttgtctcatttttaattgctacttccacactgttagcgtgctaggaggcaaaggcaacccaggcagaaacttcagcagataaggaggctcaggtgaggagtagtcacatgacttgcccatggtctcatggccaagaagtgggtatgcaggccaggtctctttattcctgggccagagggtattatttgtacagcacctctctcagaaagccaggctacagattctgaccctgagcctcccagttaaagacacataaagcaaatcgtccatccaaaaagattctattttgtacccagcagtttggcaaatgttaagtttgataatacccacttctggccttggcgtgtggaaaacaggcctactggaatcttttctggagagtcatttgccacgtctgtctgaatttaaaaggcacgtgctctttggcccaacagtccaaccctgtggaatttagcccatactggggtgtttgttgaacctctcagaaataaaaacagtctaaatatccatccatagaggattgggcattagaaaaattgtcgaattttgacaatttgtcaaatgtgacagaaaaactgtcaaatttctctgcaaataaacattatcccgccaagggaagatgataaacacaattctgcctgtttactgaacaccttcattagcaagggtcccaactgtggcaaagtggcagaaattcagagcaaatggataccgtgatgtatccagatcctggagttgatgctgccagggaaaagcatccactagatctgaatgtcttctaaatgtgctcatttggaaagatcacacaaatattagataagaaaaaaatttcagagagagaagggggggtaaattctccagcttgtggacttgttttaaacttgggtaccattcaaaggaaaaacattgttagaatgtaaaacagccttgctgtttgtgatcaactattttaaaatacagttttaggccaggcgcggtggcttatgcttgtaatcccagcactttgaggggggccaaggtgtgcggatcacaaggtcaggagtttgagaccagcctggccaacacagtgaaaccctgtctctactgaaaaaaaaaaaaaaaaaaatagctgggcgtggtggcgagcgcctgtaatcccagctgcttgggaggctgaggcaggagaattgcttgaacccaggaggcggaggttgcagtgagccgagatcgtgccactacattccagcttgggagacagagtgagactctgtctctaaaaaaatatatatacagttttaatctctttagtcattatgctgttctgagggccatcacagtttaagcagagagcctagtgttagaaatttataaggtgctttttcttaatatatacaagtttgtgtgacagagagtaaatattgggctctttttggctcgcagagtggagccaggagttagcaatgagtctcactctgcaaatcctgctgggtgtgagctgtgttctaaaccttgtggcagtgttaaatatattaagctaatcatgtggaagttaaccagaggccccttcacatttgtcatgtggcgtctgcagtcatttgctctgaatttttgccactttgccgcagttggggcccttgctaatgacagtgttcagcagattgacagattcttgtgtttatcatcttccctgggtgggatcgtgtttatttgcagaagtatttgacagttgactcattacattaagagatttctgaataccagggacatgtagcttatgtaatagaaaagaatgagagaatttaagcacaagtttgaccaagatattggctgcaggattttcaagaaaataaggaaagtgttgtattggattctgactgtgaatgtttgcttgcttaatagtttagtaccatattggaatgaaatcattggggttgaataatccattctttggtttgtttcagaaacatgtgtgtttgcatttcttggcctgtccatttttagttttcctcacaagtttgaaatttcctttgtcatctggtgcatagtaagtattttcctttttttttttaaatttaattacttatttgtagatcaataaacacatgttccggattcatttatgtaactgttaactgttcaaagtcaacagctacatagacactcttttgtttaaagtttcttttgttaaaaaaaaaaaatcacaaacatacagtaagggggcaggggtagaattaagtgaataaatatccccagaaaggacttttgcttgttttttaagatttttaatggccttgaatattatggtctttaaataaaagtacaggtttgtaagtttttgtgtgaggaggtaaaagcagatttcaaaattgaatatgtaattgatcataaccatgtaaaaatattatgcacagaaaaaagaaaatatgtaaagaaaatatagccacatgttcacagtggtcatagagttgggatttctttctcttttctgctttttctggataatttattatgtacttcttactgcagttttcttcaaatttgtctatttatatttgtctatttgtctgtttataagatattgttcctgcaacctgggtacttccatctctcagtcagcaagagctcattgctcttggtcactgttatttgtcctccaaactcaggtttcagggcaagagagaagcagcaaaagtcctttacagaaagtataatagcctaggctgggcgcggtggctcacacctgtaatctcagcactttgggaggccgaggctggcggatcatgaggtcaggagtttgagaccagcctggcaaacatggtgaaaccccatctctactaaaaatacaaaattagccgggcgtggtgatatgcgcctgtaattccagctactcaggaggctgaggcaggagaatcgcttgaacccgggaggcggaggttgcagtgcagtgagctgagatcatgccatttgcaccccagcctgggcaaaaagagcgaaagtccatctcaaaaaaaaaaagtataatagcctttagtgtggccactggggaaaagggacacatttgatcaaacctgaaacaagtgtaggcatggaagattggatttcagtgggtgaaacagggaggtgactatttcagccacaggttgggaggaaaatgaaaggatgccctggggtgacaactcagttttctctaagcagttaggcccaggctggccctgcagctagtggagatggcctattcaggtgggttacagttcctgccctgtaaactcaatttagtggtcaagagcatgggctttggggtctgaaccagatttgagacttggatccattacttcctgccttgtcaacttggaccaattacttcatctctctatacctcagtttccttgtctataaactggagacaacaatacctactttgtaagacctttgcaaggatttaaatttagcaggataatgcatgtaaaatgattagcatgttgtctggcatagaaatgtttgatgattggaaacatttactcttggccaggcatggtggctcacgcctataatcccagcactttgggaggctgaggcgggtggatcacttgaggtcagcagtttgagaccagcctggccaacttggcgaaaccccgtctctactaaaaatacaaaaattagccgggcatggtagcacacgcctgtaatcccagctactagggaggctgaggcaggacaattgcttgaacccgggaggcagaggttgcagtgagccaagatcacgccacagcactccatctcaaaaaaaaaaaaaactctcaaattcatgcttgttaaaggaataaacttaaagcctaaagaatgtactgtacatgtctatatcatccttttcaagtagttatggtgagaaccaagatgaagaaaatgaaagtaaagtaataaatgtcctaagaatccacttagataagatttaaactttaggctgggtgcagtggctcacacctgtaatcctagcactttgggaggcaaaggcaggaggattgcttgagaccaggagtttgagaccagcctgggcaacatagcaagacctcatctttaactaaaaaattttaaaaagtagccaggcatggtggtgcatacctgtagttctagctacttgggaggttaaggtgggaggatcactggagcccaggaggttgaggttgcattgagccacaatcacaccactgcactccagcatgcgagacagagtgagactttgtctcaaaaaaaaaaaaaaaagatgtaaactttacataaagctgtactttgccaagactaacatgcctttggagatggagaggaaccaaaagccacagcaagcagctggcaggctaagccggggcatgtggcctcctgatagtccctacctctgcgttcctcttgctcagagagcagtgtttccatgcatgggaggtccttcatagctgccctcctttccctgagggagaggcagaaacaccttgtctgtccccctagtcctggtatgatcaatgcagccctgtcccaaggaggggcaccttgggagtcaggttgcccttaaactaatctgtgaatacttctgtacagcctcttggcattcagttttgttctgctgtcattactaaagcccttcctgatacctcgtccgtcctctcttttctggctactaagaaaggtaacgtacaaagctttatcctttcctagatgcatagaatcccgcagctgtggcagcacgcccatgctgggtctctgacgagcatggtgttgctcgtgtcttttgtggctgaggggaatactgcatttgtactggatgtgttacacagtctgcattagcttcatccaagaagcttcagcttgaagagccagatgttttcacctaagacttagtttgttgctatcaacaggtgcttgtactatttggcagagcggtaaacattttccctctttcctacctcctgaatttcttccgggatcataaaatcacaccgaagatgatgttcatcatgtggtttagtggtaagtcaaatcttggataaatggggtggggaagtacctgttaaaagcacgccccatacagggagagctgtggttctctgctagcgcccttggcaaaaccacaagtaatcaatactcccgtttaatggcacccactgcaatcaagatggtgcccctcaccatggtgctatgaagtgggtgaggcttggttggaagagggcaaacaacatgcccagggtcacgtgaccactggaggcagagccgggatttctgccactctcttctgaacaccatagtgcagtccgggatgcagctgggcgtgcttcagcgcctccctgggggtcttctaggctgaagtaataatggtctcaaggtagaaaaggtgaaagttgaaactgtttcataccttatgttagttttggatatttttccttttagtcacaaagttctagtagtttaatttgaatgtttcagttgctatttaatcactttttaaaggacggaaatgatttcatacatctttgcttctaaagaactggatccataggcatccttaaatttatttttgagcaatacatactgttctttatgctttcttgcttaaatattataatcaaagtattttccgtgtgggttgggttatagcaacacactataatgttctctatccaaaggcatatctgcaagtttgtctcagatttctcttctttcaaaaggccatgtttaaaaatgtatatgtttcatatatatgtacgtatgtgtatatatacatatacatttatatgtggtgagaaaaactcatttttttcctaatctcttttgccagtgaggcaaactactttgtaaatggttgcagaagtgtgtcagaggtttttgaagtgatgtgggctatttgggaaggggggcatgaggataagagagcgttatggggaaggttggagtgtatttgaaatggcgggggctgtcggctcctgttctctcccaggctccccgggctcttgctctgtgggtttccatccaggctttcctggatcctcaacgaggggcactgaacaagcctctgctaccggcccctcccatcatcatttaagcaatcagagcttctcctccttcccacaaaacaccagcaacttcagccagagttcctcctcatgtcccccgcagctgtgtccgcacctcttttgccatggccagacccttgcgagtgagccgtgctcgctcattttctccacttcttcaccgcctgtccacggggctggaattggccttggcaggtcaccagtgacctcccgcagccagacctggaggggaggcgtccgcccccgtcctagcctacctccttcccactgcccctaccttctggcgaggaccacttcactctcttccccggcctctgggccatgctcctcctttctctcctttgacgtctccttgggctcgtcccccttcgctgacccctcaaatagtggcttcttcaggacttggccccagccccacttctgttcacgtgttctgcacttcactgagtgcgctcacccgtccactggccttcacttccacctagtcccaaagctgttcccgcgaacccagacctccctctgggatccgtactcctgtttccagctgcctgtttggatgccgtggggatgctgtcatccctatgcctttgcatcccccttgcccaagaaatcctactttgaattgcccggtggcctggctagccggtactaagcacttgctgggtacacaccctgttaaagcacattacatgtcccgtgtcactgaatcctctggcccgtgacaggtttagagaggctgagagtcccttgtcctcaccatgtctctgtattatgtgccctttgctcttgccctgccgtctccccatctgggtctggcctgcagcagcctggctgccctaccccatggtgatgtgagcctccccgctttcctgtctggggaaggtcctggtgctgtctgcaccatgcccccccccaccccccacccccctccccccaccatctcttccaggtagcatttcacaccccttatttgctgtgcctcctcccagctgctctaggagctccccaagggtggggctaggactgcctgtcccctccgtatggcaccaaggaagccaggaaacttctaacagaggaatgtgctgttttccagctcagtccatgcccctcagttgtgccctagtagcgtcacagaggaccagccagcctgtcattaccacctaagcagcccacagccccatcagtgccaccaggggcctccacagggacagcatctcgagataggaggggtactggacacattgcatcttgtgctgttgtgggtattagttgagtggccctgggcgggccatgctgctcttggcctccatccctcatctgtgtgttgtggacaagagtagcgctgctcggtgaggattcctgtgaagatccagtgatgctctgcacactgagcacctgcccaggcctggcgcacacacagggagggctcagcccacagcagctgtcctgcagtttccaagacacgagcatcaggcttgctaagtcctcccgcacccgcatctggggctctgtagctggggcaggccatctcatttgatctgccaatgttggaatggaggtgagtctgtggtcccatctctgccacctgctctttacaccccaaagcctcacagggtgagcacacactcttcagcagggccattagaatagtcagctggtcgtggtgctgggccggctggatttccagggaagccagcccatgaagctgctgcctcttcactgtgtcctctcacactgtttgctgtcacccaggcctgcggggagccatcccctatgccctgagcctacacctggacctggagcccatggagaagcggcagctcatcggcaccaccaccatcgtcatcgtgctcttcaccatcctgctgctgggcggcagcaccatgcccctcattcgcctcatggacatcgaggacgccaaggcacaccgcaggaacaagaaggacgtcaacctcagcaagactgagaagatggttagtaccatgcgcctgtgggggtggggcagggggctggcctgctacgcagctggtggtccccactgtcaggaaatggggagatgagccttgctttcttgctttgaggatgcccagcacctccacacacacgacacacacacacacacacacacacacacacacacacacacacgacacacacacacacacgacacacacacacacgacacacacacacacgacacacacacacacacacacacacacacacacacacacacacacacaccccccggtcatcccccctgagaaggaggtgacggaacttgagttctgaagcatggctcttggggtgggggtgtctggtggccttgtgacctgccgcagccatgggggctgtggacgaccccatctgctccctctctgaagctccatggggcaccacaggagtctggacctgtgccacaaccacagcagtgcctctgccctgccagcagctgagacacctgtcagggcccaggtttgagggtttcaaaatcctgtcattccccagtatggttttactaaaaaccacctgttgggggcctgaggaggggaggatgtcttgcggtggctgtgagggccgtgagaggggtactcccccaaggacagacatggtgtggggctggaggtacccaggccccagctgtagggagagctgaggttctgcagcctgcccacctcttcttcctacaagccaccgcccctgccaccaggctgccttcccgccctgtcttcaccctcaggacccctgtgcaaagctaggccctctgaccgaagcagaggctgctgtaggctccagcccagagcatcccctgctgatcaccatgcatttctggacatgcatctctttctagttcccgtattctaggcctcagtaactttaatcagtcatcagaggcccaggagtcctcacgtggccatccacggctaacactggagtcagggctggcaagaccatggcctccaatctccatgctcagctgggcccctcacccagtgcagtgctgctgggaggaaacttccagatggctgtgaggcctggctctgcagaacttccaccacactaagaggccctttgcccccaccccctatctaccaacttttttgtttttcacaaaagctctagcttaggcctttctgggtatcagaatcggtggggggcttgctacacacaggctgctgggtctcacaccagcatctcataggtatggtatggggtccgaaagaatttgtgtttcttcttatttatttttgagacagggtctcactctattgcacaggctgaagtgcagtggcgtgatcgtggcccactgcagcccagacctcttgggctcaagcgatcctcccacctcagcctctggagtagttgggactccagacaggcgtgaccccacccagttaattttttcttatttttagtagagatggggtctcaccatgtggtccaggctaagaatttgcgtttctaacaagttgccaggtggtgctgctgcagctgatcctgtgaacacgcttggcgaagcacagcactagcagaaacaggacagctcctctgaggatgaaccgctgagtttctggaatgttttctgtggcagtcagtgtgcttgcgttttccttggatgatctcagattgtccccatagcctgccagaaactggcgctttcattatacccactttgcagatgagaatgccgaggcaccaagagaatcagacagctgtgggcacagactcccgagcctgtcctctttactaccacgctgatcagcagtcctcaaaatgggctccccagactagcagcatcactggaaacctgttagatctgcagattcccaagcccattcagacctactgaattagcacctctgcaggtggctgcggtgggctcagtattttgtggtttcacaggccccccaggtagattctaatacagaccagtgtttgacaaccactgcttcacagcatctaaatgccctcccctccccggccatcctctgccctccctgcacctgccccgtccccctccccaccacctgcagtgaagctgcagagcacacttcactgtggccccactgagactcctccagcagagcaggcgctgcactcagagcctgtctgctttgctcctacctatgacccgagtcccgcctctttacctccgtctctcccctccacatggggtccttttcttcgtccctccccaattcctacaggatgtgttcctctcccctctcctctcttgacttgattggcaaaagcctgtccacggtggagtcctagctaatagagccacaggcaaagagacaaaaagcctccctgtgcgatttgctgctaatgaaaagcccagaacagcagttctggtcctggttgcatgatagaatcacccaaaagcttgaaaagcttaaagaccaagccccagcctggcccagtccttctgttttagctgtcctaggtggggtcctgggcatccattgtgccctgatggacgttcctgcctccctgcaggctcccaggaggccgtctgctgcccgtcaccctgcattgatggtcaagtggagttagggttggggacactggcggcctgggtggtgtgggggcttccaggaggtgccccccgatggtgccagctggtggccgtcgggccgcctttcctccctgctcagggcaacactgtggagtcggagcacctgtcggagctcacggaggaggagtacgaggcccactacatcaggcggcaggaccttaagggcttcgtgtggctggacgccaagtacctgaaccccttcttcactcggaggctgacgcaggaggtgggataccggccaggccacactttctgggggtcccttgcctgcctccttcaggacctgcggtggcccagggtggggtggaggaagagtggggaggcaggaaagctcacgtgggcccgccaggccgccgcctcccgatctggaggctggacgtgcttgtggaactcggcatctgctgtttttccttcgctgccacatttagtgcgaggttaataatagatttgttaacacagtttggttttcctggatgatagactcggggtattgatcagctactgaatcggagctgaggaatttcagacataccagggcctcaagctgtggcccaagtctgcccccagctcagggctctggttctgtccctcggggcactgctggcctctctttagttggaggccttgggtaggggtggggctcttcctgctgctgcccgctttgtttccgagcaggcccattttccactctccggcaggcctgagagctgccggtgtgtgcgctcttccaggagccaggcagctccagtgactgtgaccacgaccgcttccttctccagcatcctgtgcagtggatgcagctgtgtccctgacagctgaggagatggaggcctaagggggtgcagtaaccccgcaaggtcacagccaatatgggcataactgggagcagagctaactgtgtctgactccagagaccacatgttcagcctcaagccatgctccctcctcctttctgaatgacacctcccgtgacctccacccccacaaagaacaatcccagctcagtttgttcaactgaaactgaagttgcctgtggccatcaccctgcctcccacctcctccctagacaccccacacaaaacacccagtagcatcccctcccttccatggccctgcccctgacgccctgacggcttggttgtgtctctcgacccaggacctgcaccacgggcgcatccagatgaaaactctcaccaacaagtggtacgaggaggtacgccagggcccctccggctccgaggacgacgagcaggagctgctctgacgccaggtgccaaggcttcaggcaggcaggcccaggatgggcgtttgctgcgcacagacactcagcaggggcctcgcagagatgcgtgcatccagcagccccttcaagacataagagggcggggcgaggtactggctgcagagtcgccttagtccagaacctgacaggcctctggagccaggcgacttcttgggaaactgtcatctcccgactcctccctgagccagcctccgctcagtgtggctcctcagcccacagaggggagggagcatggggccaggtgccagtcatctgtgaagctagggcgcctacccccccacccggaggacccctgcggccccctgcctagaggagcaccatctacagttgtgccattccccagccactgccttcatgctgcccccgccggactggcagagccaggggtcagccacctgcctttgagtcatcaagatgcctctgcagccacaattctgacctaagtggcagggcccagaaatcctgaaaacctcccgctgccttttgtgatacttcctgtgctccctcagagagaaacggagtgaccttttgtcctttacctgattggcacttcgcagtctatctccctgggtagcagacggctgctgcccttctctgggcatgttctgaatgtttacactggtaccttctggtatcttctttagagccccctgcaagctgcaactctaggcttttatcttgcggggtcagagcgccctctagagggaaaagctagaggcacagggtttctgccggcccacaactgctgtcttgatttgcattttacagcaaagtgctgagagcctctagtcgcctcctgccatctgatctccctccccaccattcccgtactcagttgttcttttgtctaatcggaggccactgtgctgaggccctgcagtgtctgctcactgctgccatcttcgctgctagtcagggttccatcctctttcccctctcccagttccctaccacgttggatcccattcgtcacccatgctagggtccccaaagcactggggcaggggccagagcagcagcacccagtgctccctcctctactctgacctggggccccagcatcctggagcacacgctccacgcacacacaccccagccctgtcccaggggcctggccccctcagccatctcagggtgaggagctgccagtcatgtccagatggaatgactcccatcctctcctcatctcccctttgacgagcctcaaactgctcagctcatcaaagagccattgccaacttccgtatgtggttctgggtcccagggagccttggaacctggcaccctggggtggtttaattcatcattaagaagcattcctgcttctcaagggacacagtggcctgcatgggccagcatggaccctgggctgatcatgtgcattcctgcttctctggggacacagtgggcccacatgggccagcatggaccctgggctagagcaagcacatctccatctcttccacctcaggcagtgtggctccagatgtcaggagggactgacctcaggaccttccaggttcctctgtgccaggaatgagaggccaggcccgatcctaccacctcgccttgaccctgaagtcagagcaggccagccaagcaggaagcacactgtttactttttgcatgaaaagtaaatgtgtacttgatagagctaaaatatgatcttttttaatttctcaaccccataatttgagccattgccttgcttaattttggtttccaccatttccttttagtggagaagagaggaagtcagagggtagggacctttgcctgcccctgggcgagtgcgggcagggatctgagaccagattgttctcgcacccctgccagaactcactctcccctgaagtttagggtcccatctcccagatgtaagttgttttgcaaactcagtttgccaggatttctttctttcctaatcttaaattcacagataaagcaatgaaaagagtcagatcccatttccgtctgccccctcgtcaccaggtgtgatagccccagccaggtcacacctggcctcacactttgagctgagacttgaaaacgatgctgtggcggaagagcatgtggggcttggtggaggggccccaggatttgttgggggcaaagggggtggcgggaccgttcccaggaggtaccagcacctgcctcgatctcctctgagcctcttctgccccctgtcggccaggtgaggtcagcagcctgggagagtgcccccaagagatgagggcaccccgtgttccttggcaatcttggctcaccttggtaacaaaaggccatagaagtctgtttttctgggtcagttttttttgcctgagaataacaaattgctgctgtctacctttagcacacccaataattctatttggggcagtgaatgcatagaagatataaaaatacgcagcttaactatatcttcctgcgtgtgtatttattttcttctgggtctaggccatggtacaggagaactgtggcgtgtaggaggaatacttcaggatgagtgaaggctggagccagggagcgctggaggaaaccagccctttagccagcagcccctccaccacaggcactgctgtgtggaacgagttcttggaatgaatcccatgctttctgcagcctgtagttgttatgacccctcggaacaaccaccccgtggcttgtgtggggtctcgcagggaaaagggctggcttctaggtccccgagataagtgtgcagggggatgggccagggccaggctaagggtggctcagttccatcatctggaggtcagacacactgtccagaggcagaactgaagccctctcggcccctaccctaagccagccacccctcttcacagtgggtgagctgggctgggctggctggcatgaggccaaggggtaggcctgagcgccagagtcgcccaggttagcccacaggattcctttgtgtgccatggaatgctgaaagatgggtgactggggacccttcttaaaacctttggcaaaggtgccatcggcagggcttggcctcatgaagtctcaggtccgtgttcccgcagggcgcacatgcttggagagtcctcagcagggtagccgaggccaggccacttctgctgaggatggggcaggctggggtgtgggtgtggcctggggtggctcagggctggaactgctgcctgattcctgtgtggggagaagctcagtggccgtttgctgccactgacaaggatttcacatgcagaagagaaaaggcccccctccaccccccgcattccctgccgagtgagagccagtgtttgctgcccttgctgggggcgggtaggaaaccctgagcttcctgatgcggagtcatgaagcagagtcctcgggaaggcatctccacagccccgggtcctctgtctaacgccctccatttcacgccctccatctcacagtcaagataaaggcctcgagaataaagagccagcccccttccatttagtctcctgccgtttcccaaacagttgtccaacagttagacattgaggggcttcactgttaccaggcatgtaacagaaggaggaagactaacacacaccccctgccccatcccatccccctctcccgagctattttcttgctgtggcctctggtgcccttgagttggtctccccggctgctctgcgggggcttcactggcttcggagtgagcgcgaagtgctggtgagcagtgggcctgtgattggatgggaagatgtgcatccgtggtcaaaagtcagctgccagccctgcggaaccagagcctcaggctgggatggggaggcctccctgcttccacctgcatggtgggcatggcctggcttacaccaaaggctttgacggtttctccaagtaaggatctgcaaatcttgaatcgtcctcaaaatgacgaagcttgaattgtcctcaagatggatgtgaatcttacattccttttcatcatttcctttgtaaaaatgacgagtgctgggtttttgttttaagaagcattatgaaggccagacttactcatttttctcccccaagtgagctgcaagaggcccctgttaggcccctgtttcctgagcagtgatgtgctgctcttcttggtggggctttgggctgggaggggaaggcgggtcagagatgggggacctgtggctgccatgcaggagcccctgcgtcatctcgttggactctttaagggagtcaggaatagatgtatgaacagtcgtgtcactggatgcctatttagaaataaagtgtatgctgctgaattggagccagtgtctgtgttcatgttcaggtggctttgcagatgcacaggtcacacctcctagactgggctctgtggcacacagctacccagcccctgggccggtggcagccatgtcaccaggaagtacagtgcttaggagcagggctgggtcaggctggcctgcgtctggttcctacctttggccctcagtgaggagcatgtgaagctcagcccccagccaggctcagcttctcctcacgatgctgggagcccttcctccctgggttcgctggctgttcgcccaggctgcagggccgcctgacctcctgctcggggcttacagatcagtcccccacaggcctttgcctgatggtgaaatggggaaattctgtcactgaacctgccctgccgcaggagcgggggcatccatagcctctgatcagaagtggtggcatgtggggcaagaagggtcgtgagttcatctatacccccacgtacttccaaaggcatccaagctgctgaaggtaacaggcacgaaccaaaaatgcatgtgatgtaaaatgaaaccagtcaggagaagctgtcctggccccagccagggggcaagagctgagtttcctggttccttcccacactgtgcttcagcccaccccaggggagactcccgaggccacagtgggctccccgtggcccgcttttggtggaaacccagattcagagaaatatttctccaccataataaaaactgcaagtgtgatgagaagtggtagctgacacttggcctcagtgtcagggaggcaccacgagagtgataaggactctggctaacagcagaattttccaggccagccctgcctgcgagggcggctgggaagtggagctgcgctgtgctgagcagagtgtcagctgggacggaacggagtgctggcagcaaaggtggggggtggtcctgagtgggcacctcgttcccacggaacagggtatgtttcatttgtatttcaaccttctcaactcctaaaaaaagctctcagggtagaggggagcaatcgaggcaagaaatattttccttagaggctagaaagctggcggggggttggagggtcacacacaaagttgagggtcctgtaacccccgcttattattccacagggcactaggggaatgaagctggcctggagcggggccccactgcctcttggaggcaacccccccaccccaagcaagggacaacacagccctctggctctagccagagaagatgtgagacatgaagggcagtgggggtcaggggccaggggccagtacagtcatctcaaggccctgggtgacagtaagtgccccgtaaatgagggtcctctttgtgaatatttatggacctgcaggagagcaggcaggcatcagccacactccccctgcctggggaggccgcctggcagacctggggggtcttagcatcagttgggaccagtctggtgctggggacagaaggaacctctgcgcatacaggcagctgccagctaataccctgatgtaaatggggaagaaaataagtctttgcttacagaaaaaaaagggcacaaaaatgtagttggttcattttgtggcgaagatgagccatacgctcctatctgctggtgggagggcagctggctcacactctccagaggacactgtggtgacagctctccaaagcctgaaaacggcccagcagttccactcatggggcaaaaggaaagtgcatgaaaaccgcactccaagaatggtcatcccggcaatatctgaatgaggataaatggaaaacaacttccttgtccatgaatgagggactggtgagataaatgatgatagaatatttaccaacagctcaagattctaaggatgtggaaaaatgtttagaatgttatcagaccagcattttaccacctttagggagagagaaacatttcaccctctccttaaatgctgtttgagattttaaaatgactaaaaacgaaagtagaaattttagtacatccttttatacaaatacacatactggcactccagcgcgcacccattcatccctaatatggaagacctggtggttcctttcaaccaccacttcttccccgagccctgttgtctttgctaagagaacccatgtggttcgtgtaatgggtgactgtatgcttcaaggggaaacagagccagttctcggttcaggttgttcctggtcattccctctacttgtctgagattggctgaggaatgggtctgtgaccttatttggcaggagaatgaagcgattaaaaaaaacaaaacaaaacaaaacaaaacaaaaaaaaacgaagtctcgctctgtcgcccaggctggagtgcagtggcaccatctcagctcacggccactgcaatcttcgcctcgtgggttcaagcgattctcctgtctcagcctcctgagtagctgggattacaggtgcccgtcaccatgcccagctaatttttgtatttttagtagtgatggggttttgccctgttggccaggctggtctcgaactcctgaccccaggtgatccgcccacctcggcctcccaaagtgctgggattacaggtgtgagccaccgcgcctggcctgaagcaatcttttgaggaatttctaaaactttccttactctcaaaaagacactcaaggaagggacatgttctcttcccattgtctgacctttgcctcccattacttgaggatgtaatgcctccacctgctgcagccatttggagaccaggagggaacaccttgccaccatgctgaggatggcagagcagaaagacagaaggcttgtatgttgtcaaggacactgctggagcagttaattaaccagtcctggaactgacctccctctggatctcatgacatggggcaatacatgttctgtatctgccatttctggttgggtattttgttacaacagaaataatgctgttataacttcatgaactgagaaaagcagatttcagaaccatatcaatagatgtggctctataaattaaattagcagtatgtgtatacaggaaaaaaatcttaaaggatagacatagagttttaacttaactttggttctctccaagtggaaggattataggtaaatttttttttttttttgagatggagttttgctcttgttgcccaggctagagtgcagtggcacgatcttcgctcactgcaacctccatctcccaggttcaagagattctcctgcctcagcctcccaagtagctgggactacaggcccctgccaccacgcctggctaattttgtattttcagtagagacggggtttcaccatgttgttcaggctggtcttaaactcctgacctcaagtgatccacctacctcagcctcctaaagtgctgggattataagcatgagccaccgcatctggccgattataggtaacttttaaaatcttgctgtttgcatatactttctatttctctcataaagaatatttattaagtcaataataaggaacacacatgttctttgaccagaactagaggagcagtgcattagatggagtgacttgaaggcccctagggaaacaggtgagggtccaaactgatgcagtcaccacggagaggcctgtggcccttccacccacgattcctcttctagccctggggcaaagattggcaaattactgcctgtggcccaaatccagcccgcctcctgtgtctgtactacctaagagctaaaaatggttttaacattttttaaaggttggggaaaaaaacagaagagtaaggccaggtgtggtggctcacacctgtaatcccaacactttggaaggccaaggtgggaagactgcttgagcccaggagtttgagaccagcctgggcaacatagggagaccctgtctctctatatataattaaaaaaaactagccagcatgttggtgtacacctgtggtcccagttactcagaaggctgaacccaggaggtcaaggctaaagtgagctgtgatcgtgccactgcactgtagcctgggtgatagaatgagaccctgtctcaagaaaaaaaaatcacagattcacaagaagttgcaaaaaagatagtacagaaaggtcccatgtacccttccccccgttaccctcagtggtaacatcttgcacaactacagaatagtttcacaaccaagaaactggcattgccacagtccacagatcttgttccaacttcattagttttacaggcactcgtgtgtgtgtgtgtttagttctacgcaattttatatcgtgtagattcgcataaccaccatcacagggaagttgccttttatagaagtattccagctgccaaacaaagaagaaatcattgaattggaatatctctattttgtaacttccagtgaaataatggatctaagtgggaagtaacagccttaatagctgctaattccccaaagggagagaactcgacataatatgcctcctgatgagagaatacgcatcaagtattcttaccacagagatcagacccaaatccaagcaaaccccaacagccagctaccatgcaatacatgcacacattcaacaccctttcacgatcaaaacactcaaccacctaggaatagagggaaactactgcaacacaatacaggccatctaggataacagctgacagcatactcaatggtgaatgactggaagcttatcctctaagatcaggaacaaggcaaggatacctacattcaccacttcaattcgacgtagtactggaagttctagccagagcaattaagcaagaaaaccaaagaaaagataccctggttggtaagaaagaagctaaaattatctcatggatgacatgatcttatatgtagataaccctgaagattccacaagaaaaaaactgttcaaactaataaataaattcagcaaagttgcaggatacaaagtcaacacacaaaagtcagctgcatttccataaacagtggacaatcagaaaaggaaattaagaaaaaaatcccatttataatagcatcaaaaagaattaaataggaataaatttaaccaagcagcaagaaagacttgtacactgaacactataaaacatgctgaaagaaattttaaaagacacaaatagggccaggcatggtgtctgacgcctgtaatcccagcactttgggaggccaagacctcccaaatcacttgaggccagaattcaagaccagcctgggcaacacagtgaaaccctgtttcaacaaaaaaaaattaagaattagccatgcgtggcacatgcctgtggtgccagttacttgggaggttgaggtgggaggatctcttgaaccaagagttcaaggctgcaatgagccatgactgcaccactgcactccagcctgggtgacagagcgagaccctgtctcaaaaaaacaacaacaaaacgatctatactgcccaaagtggatctacagattcaatgcaatccctataaatggcattttttacagaaatagagaaataaaaccatcctaaaattcatatgggatctcaagggaccctgaatagccaaaacaatctttaaaaagaacaaaggtggaggcgttacacttcatgatttcaaagtatattacagagctacagtaatcaaactagtgtggtactggcatgaaaacaggtatacactcatagaccaatggaatggaatagagagcccaaaaataaaccctcacatatatggtcaaatgatgttcgacaggagtaccaaaaccactcaatggggaaaggactgtctcttcaccagatagtgttgggaaaactggacattcataaggaaaggaatgaagttagacccctaccttattctgtatacaaaaattacctcaaaatagataaaagacctaaatgtatgacccaaaactataaagacaacttaaggggaaacttcatgacattggatttggcaatgatttcttagatattataccaaaagcataggcagtaaaagcgaaaatagacaaatgggattacatcaaacttttttttttttttttttttttgagacagagtcttgctctgttatccaggctggagtgcagtggcgcaatcttggctcactgcaatctttgcctcctgggttcaagcgattctcctgcctcagcctcctgagtagctgggattacaggcatgcgccaccacacccagctaatttttgtatttttagtagagatggggtttcaccatgttggccaggctggcctcaaactcctgacctcaggtgatctgcccacctcagcctccgaaagtgctaagattacaggtgtgagccatcacgcccagccgactacatcaaacttttaaatttttgcacatcaaaagaaataacagtatgaaaaagataacctatggaatgggagaaaatatttgcaaatcatgtatctgataagggatcaatatccagactatataaagaactgcaaataaaaaacaaaaaatttacccaattaaaaagtgggcaaagggctgggcacagtggctcatgcctgtagtcccagcactttaggaggccgagataggagataatttgagcccaggagtttgagacaagcctgggcaacatagagagatcccgtctctatttttaaaataacaaaaattaaaagtgagcaaaggacttgaatagacatttctccaaagaagatatataaatggccgaaaagcatatgaaaagatgctcaacatcactaatcattagagaaatatgaatcaaaacaataagatatcatctcaccccattaggaaggctgctataaaaacaaacaaaccccagaaaataacaagcgttagcaaagaggtggagaaatggggactcctgtgctgcaggtgggaatataaaatggtaccgctggccgggtgtggtggctcatgcctgtaatctcagcactttgggaggctgaggcaggtggatcgcttgagtccaggagtttgagaccagcttgtgcaatatgatgaaaccccgtctctactaaaaatacaaaaaaattagccaggcatggtggcgtgcctctgtcatcccagctactccggcgactgaggtgggaggatcacctgagcctgggaggtcgaggctgcagtgagctaagatcatgccaactgtattttagcctgggtaatcggagtcagactctatctcaaaaaaataaaatatattaagttcaggtgtacaataagaaaattaattaaaatataaataaaaatgataaaatgggtacagctgctatggaaacagtatggagactcctcaaaacattaaaaatagaacgccgtatagtcctgcagttccacttgaaccgcctcctcctcctcacataggacctgaaatatgttaccagtggagattcgcatgtctgaaaacctggacctactcccatcccttaagctcacccctgccttaagtgatttcctctcatctctcatttatgaagctgcagccttgaatcattcccataagaagtatttatttttctacttttgcacaatatgtgcaaataaacagtaggaaattggaggtaaacagagagaacaactactcccagtgctaaaacaacaagcaggctgaagtaaacatttaggctctggcaaactctaaaggacaaataatccagtttcctcaacaaacacgtcgcaagaaaaaagttagatgtgaaggtaatactgtctcagcctgttcaggctgcaaaataccacagactgggtagcttttatacaacaaaaatttatttatcttagttctggaggctgagaagtccaagattaaggcactggtagattcagtgtctggcaagggcccaattcctggttcacagacggtcagctcgctgggtcttcctgtgctgggagaactccattctcttcagccccttgtaagggcacccatcccattcgtgaaggccccacccacatgacctaatcagctcccaaagtgccctcctaatacaagcacactggggggattagatttcaacgtttgttttttcttggggggacatatgcagtccgtagcaggtatcatgttttaaaagccctcgtctcttagataaacactgaaaaattcacaaatgagacagacatctagaatttgcttcagaagagttcaggagtaggaaagtggatggcaagggtagagacaaaaccagattggccacaagttggtaactaactgttcaattgctgaagctgggattcattatactagtatcacttttttgctttttttttttttttttttttgagacagggtctcactctgctgcccacgctggactgcactggtgccatcacagctcagtgaagcctggaacttctggcctcaagtgatcctcccacctcagcctcccaagtagctggggaccaaaggcatgtgccaccatcccagctaatttttttttaatggggtctcactatgttgcccagattaggcttcatgtcttttgtaaacaaaaaggttttaaaaacagacaaattaggccgggcgtggtggctcacgcctgtaatcccagcgctttgggaggccgaggcgggtggatcacgaggtaaggagatcgagaccatcctggctaacatggtgaaaccccgtctctactaaaaatacaaaaaattagccgggcgtggtggcaggtgcctgtagtcccagctactcaggaggctgaggcaggagaatggtgtgaacccgggaggcagagcttgcagtgagccgagattgcgccactgcattccagcctgggtgacagagcgagactccgtctcaaagaaaaaaaaaaatagacaaattggggcttaagtgagataacagtttatttttcatataacagacctagaggcaggcagcacgggcaggccatgggggcagcttccagagcatcagggccagctgctgtagctgctgcccaccccttcctcgcttggccccctcagcttcatagagcagctccatctccagccatcacagccattccagccaggaagaagggctgggtgggaagggcaagctcccttccttgaaggccatgcccagacaccacacaaagcacctctccatccagggaccagacagtcatctgaccacacgtggctgcaggaaaggctagggaaggcaatctttactataggtggccacagatttgaaaaccggggcttctactaccaagggggaggggatggagactggggtacgatttggtgtctgccacagctctcatccctgagattggtaatctagcatcctaggtgccacagatcggccagcagagctaatgctgtccagctggtgggcccaatgaggtttaaatatgtttgtcatttacatgtacatgtaatgtacatgaagcaatctgctctgaagtctctgttcccttttggatgcggagcaagcacctggcttccttagctctcccagggtaggtgtgcgtctccaggaaactgctacccccgacagccagggtggcaatgccgtttcctatgctatagctcaaagcaatccagcacctgagcctggctttggcccaaggcctgggtatttgttcagccagcaaatgaaatggagaaacctgttcagtgtctgccctgacagctgagctgcctggtgggagcccacacagcagcgtggtcagtgggtgggcacaggcctgctgctgctgccttaagatttctgccatgtattttgcttttaagtcaatcctcacttaagaaaaaaacaccttttttgttttgttttgtttttccaagatggagtttcactcctgtcaacccaggccggagtgcaatggcacaatcttggctcattataacctccgtctctcgggttcaggcgattctcctgcctcagcttcctaagtagctgggattacaggcacccgccaccatgcccagctaatttttgtatttttagtagagacggggtttcaccatgttggccaggctagtcaacctcctaacctcaggtgatcctcctgcctcggcctcccaaagtgctgggattacaggcgtgagccaccgcacccggcccttaaattgatttttaaagcaaacctatcactgttacaatggaaaagtagtatggcctgccctagaaggtaacaaaacctggctaagagcctgccacacgctgtgtctgatgccaggtttctctgttaaagacaaggtagcatcgaactgactccctcctcaagacagttaaatggatggaaaaaaattcaaatggaattaacttttaaaaaacatcttccaatgttattaatgcctctttgtctctactaacaagcatttctcctggatgatgcagtcccctctttgggaaacatctgaactctgtgtaccgccatttccccatatgtaagatggagatggtaacagtgcctatttaataggatgactgaagctagtaagtaagatcatgcacatagtctcaggatacaaatgcctggcgggaggatcactcgagcctaggagattgagaccagcctgggcaatatagtgagaccccacctctacaaaaaattaaaattagccagacatagtggtgcccacctgtagctacttgggaggctgaggtgggaggatcactcaagtccaagaggtccaggctacagctagccatgatcacacaaccgtactccagactgggaagtaacagagcccgtcttaaactaaaaaaaaaaaacatggccgggcgtagtggatcacacctataatcccagcactttgggaggccgaggcaggcagatcacgaggacaggagatcgagaccatcctggctaatacagtgaaatcccgtctctactaaaaataacgaaaaattagccaggtgtggtagtcccagctacttgggaggctgaggcaggagaatggcgtgaacccaagaggcggaacttgcagtgagctgacatagcgccactgtgctccagcctgggcgacagagcaagactccgtctcgaaaaaaaaaaaaattttttttacaaaaaattaaaaaaataaaaagtgccaggctcgcagtatagcactcaaatgctatttgtcagtttcatggaagagaaaatttaagtcttgtcattaaaaaactaaatacagcttaaggaaaaataaactcccaagtaaccaaacttcaaagcagggccaggggacataaaaccccaaacacttcatttaacaatggaagacactttattattattatttttaatcatctctcaacatttcaactcttggtagaaatcaaatgtaaaacatctgcatttttaaattagcatgtatttaactatctcaatcacagcaacctcatccagtaagatgcacacctgggagcagggctgtagtatttcgtattccagtctgtgaccacagtgcgtccgtgatgacaggtacactggactttccctcctaggatgtgttagtcattcctgcttttgtccatagggtaagttacgtggcatcacggttggttagaaagagttagttactgtaatgctggcgcaatctggaaatggaaaactagaaaactagagctctcaggagtgggccaggcattgccgattctgaaatgtgaaaaggaagaacatcaaagatgaatgccctgctaggctggtcttagtaataaagttggttgaaattcagcttaatatacacactgtacatctacatgtgatctaccagatagatatatatatatatatatatatatatatatatatatatatatatatatattaaaaagagagccatagaagatttggaaaaccttaaaatcactcaactgagttggaagaacatcagcaaattcacagtggcctcaggattcagccagacttaaacttgctcaagagctgaataactttctcccagaaaagcccactgcatataaatcccttaacattgtgtacatcacaaacagttatggctaaaatatagttagttcacaaggaagcggctttattttcaaactcttgccccactcctgctcttgtacccccacaaggaaaatccaggggttggtaattcacatgagaagctgaaggggccttcaggcttggaagcgcttaggcttagctgagcatctgaggagccgtctctctgatgggcacatgccgactcctgcccacttttagtgcaaaaagattgcaaatgttgcagatgagtcctggaaactggtgaagagaagaggattgagatggaggggcagtaggaatcccaaatgattttccttctgaaacgagactcaagaagtgtgaagtgcaaggttcctgctcagcaagctataggtccgacaggtgaggtccctgaattgtcataggttagcagtctgcagacacacagacctcgacacccgcgctcaccccctaagtgcacactggaggtaggtgtatagatagttactgcagggaagacagtggctctccaccagctcaagaaaaggaggcttcatgtctgttcctccctgccccaaactctcctctcccctcgggccatagtgagtggaggatacaacacgaatgggcgcgaggccctcccttggaagactaaagaacccagggcatttaataaatagctacataattcatttttttaaccacgttgaaacacacagcaagttgaatatttatttaaaaataaatctcaaaaatatctattgacagtacagtaagaggggcatgtgcaaacaacagaaagggggaagtcagtcctgctgtgggaagcccacacatcagtgtgttggagcaaagttcacgaaggccatgggctgactgagctgtggtgtacgaaatgacattcagctaatactggactcggttcacctttgacacctggagaggtggggaagccagggggtggggagtccagctggggatccttgtgtttaggaagggggcggccaagggatgagcctttgggagaggccccgtgtggcaggagggctcatttcacaagccaacaggcctctagctcgccgctccaggtggatgtttggtgacctgaagggcccttcccagtccaagttggctttgcaatgggaggggtaggtgcagcgagggtcccagagacagaaatcctctttaaaggaaaaaacaaaacaacaaaacaaaacaaaacaaaaccccaaaaaaagaaccaactgaacagggagtggagagattagcaaaatgaatctgaacggaagtgccaccttctcccttgtcagacaacaaagcagccattggttgagatatctgagtcgctaagtgaactcccacgtggacacagccagcccacgatctctgccacctacatggtcaagtgcaggcctccgcctctgagatcaatgcgttagtacttcttcaccgtgaaacccgaaaggtcggttgatgtagcccttggagctggaaggggcgaggccggtctatctgtacacgagatgggagagctgggtggacttgtagttcagctggttgttgggcatgaacttgtgcagctcactctttttgtagcaggggtcataatggtaagcgctgaggcaggcgtcacatgagacttttgaacactgggtgcaggtgttggtggcgcctgggcggttgcagaagccacagcgggaagtgggcgtggtggagggcttggatttggagtgaaggtgcgggaggcggtcgaggccctgagtctggcctgggtacttctcccgcagagatgccccgtgggccaggctgtcatgagtcgaggccttgctggggaaggcgctgggcttggaagctggaggacaggtgagcaggctgtcacagcgctggcagagggaggagctgcaggacagcccgcagctttggcacttggagagggcggactctttggcagggggcgagcgcttgtggtagagggagtgggcatcgtttctgagcagccacacatccggccgcagagcatcctgccgacggtaggtggccctgggttcagagtctgtgtacagatccacgtcatcctgagtggagaagtaggtaccgcgcagcagggccgggccgttgctgggggaggcgggtggaagcacatccgggctgccgtggggggagctggccatggtcagcagcgaaggggatgggcggatgatctcatccttgaggtcgtcccccacatccgttgccacaggctccttccgaagactcaatgaggccttcaggggtggcttccggctctcccagtagctgtcataggcatccactgacctcgagggcttggtcacgcggggcttgtagtagtccttggccgcccgctcgctggccgacttctggagtgccactcgtgacatggaggccgtcaggtgctcccggccctctgcccgccgccgcagggcgtccgagcagccgcgcacatcctctgcactgctcttgcgctcgctcacaatgtccagctcggagtagcccttgtccttcacttgtgagtggatttctagcatctgctcacactcgactttggccagaaagagctcaaaggagaccatcttcacctggagggtctccacgagctctctgagcttgtatgcagtgcccagctcaggtgtgtagcccatgcagctcaggatggctcggatgtcctcttccagtaatgtcgacttgacataataaacaaaagggcccgtgtaggtctagaagggagggagtagaaaagaaaggtggggttttctgtcagagacacaagacagagactatgtcaaagcaaaggatgtccagctctgaagtggggcggcggggagagggcagggcagggaaggatctcgacagcctcaccctgcgggaggcagaagacgcaggagctggggcttgctaagcactcaggaattgtgcaaggaaatgacccagcagctcctttcttttgtttgagacggagtctcgctcttttgcccagggtggagtgcggtggtgcgatcttggctcactgcaacctccgcctcctgggttcaagcgattctcctgcctcagcctcctgaatagctgggattacaggcgcccgccaacacgcccagctaatttttctgtttttagtagagatggggtttcaccgtgctggtcaagctggtctcaaactcctgacctcgtgatccacccgcctcggcctcccaatgtgctgggattacaggtgtgagccaccgcgcctggcagcagctactttgttaaacacaggaagcaaaacctctcgcttcctagtggggcacgaagactctactccatatgaagagagagcctgggcaaacatggctgaataaaggggccagattacaggcagaacgcggtgacaatcagaacgttcctctctggtatttccatgaggggctgagtaacacggcagactgaagggcctggctaggtgacagctctcctgtgccatcccctctcttgattaccactcctcccatggcagaatgaagaagcctggctaggtgacagctctcctgtgccatcccccgcgtggtctgattcaggatccctctctcaattccccctcctcctctactgttcccacttagtacagaacacccctcagcttgctgggaccgctgagaagcttcctaactgctctccccatccctcccacctccccccacccctctacagcctacttcccataccacagccagaatgaccctcttcagatgcaagccagatcccacactgcctccttccccgcctactcagaacaaatccaagccttgccctgggccacaagaccctgcataacctggctgcccctgccttcccagcttctctgcttaaggtgtggcagccgggccagaaacggttcagaggtgatgctggagagacggggaaggttcggagcccggaaggatctgagagcacaggatggatgggatcagactggcatagcctctcaggagggactgccaggggcaggaagagagaaggagggcctgtatggaggctgctccaggacctcaccttgatgcttctgaattccttcttccacgggtagaggaagaggttgatgcccaccgtctccagcatgctgaaggcgccgtgcagagcccgcaggctagaggagctgagcgagcgcaaggagctctccaccacctcatagaactggatcagccggaatcgataaaagggatccaccttgtgcaggctgagcagggttgaggctgccacccgcaggcactcatcgctgccaggccgctgcctgctggtggtggtatccactttgctctcatggaactgcacgtacttccgaaataagtcatccttgaatttagtatccattgaactgggcttccccatccgatcgaggggggctaccttatctcctccatggcttctggattagaggcagggacatcactaaaagcatggacatgttgccgcctggaccagcggagtgctctggaaggaggggaacaagaagcatgtcattcctcgatacggtcgcgcttcggcttcaggtcgctgaggcaaaatgaacagcagaactggcctgggctacactggaccccagcagcacactacagagcatgtactacaagcagggttacaacagaggccagagagagatggaccttgactttgttgtgctcacaaatgaaaaatacgattaatattcctgaaagagaaattcgggtgagtacagcaggagctcctgtcctggtttcgttggggaagggcgagtttaggaaagccctcttgagacagcaacagacctgaaggatgaggagtctgccaggccaagaggccggggaaggagtcgcagtagaggaaggccctgagctaatagtaccagaggctccagacacgtgacgagcttcacacacactaactcgcttactttttttttgagatggatccttgctctgtagcccaggctggagtgcagtggcgtgatctcagctcactgcaacctccgcctcccgggttcaagcgattctcctgcctcagcctcccaagtagctgggattacaggcacctgccaccacgcctggttaatttttgtatttttagtcaagatggggtttcaccatgttggccaggctggtctcgaactcctgacctcaagtgatccaccagccttggcctcccaaagtgccaggattacaggtgtgagcccccatacccagcctcactttttcttcttaaacaatcctaggagagagacgctacaggcagccccagtggaccatgtgcaaactgagacacagacattagaaactgctcaaggtaggccaggcacagtggctcacacctgtaattcctgaactttgggaggctgacgggggaggatggcttgagtccaggagctcgagaccagcctgggaaacacggtgaaaccacgtctctacaaaaatacaaaaaaatttttaagaaaaagaaactgtccaaggttatagaactctcaggaggcagagaagctgagctcagaacccaggcaatctggctccaaagtccatgcccttacccaccacaccctgctttcctgaggcaggaagcctggaacagtaacagaactgcagccagtgaggccgaggccacgagggcaggggcatgaggagaggcagatgccagcatcagcgggaccctcagccccaaggccgcaagagcacattcagaattcgatattttatacaaagagccacgtgaagccactgaagagtttacagcgaggggagagagatacggtcttatttacaattttcaaaagaggccaccgtggctaccggcccctggagtgctgttaccggcctttgacagcctgcggcccctttatcaccagagcgcttgacagccccctgttgggagaggatagaatgttctgagctgggacacaggctttacacaatcttgtcatctgcttagccacttgttagtagaacaggcacagatccagcaatattcttgtcaccacaacgctgggagcgaatccggattaatggagggacactgccagggccaggggagacaacacgcgcagggtcacggacacggggtccaaggccaggcacctgcgagtgaggccagggctgcttctccaggttacttgggcaaattgctccacctccctgggtgtcggttttctcctataaaacggggttaataatagcgcctctgtccagagctggcgagaggattatgcatgatggaatatgaagctgctcagagagccggctccgggaagtccttgatggccattgctgttgtctgaaggtgctgtacccctaagtggacaggccttctctgagtggggcaaatacctctgactgggtggtagatgtgcattttcacatgctctggtcctgctgctcctgcccagaagctccgtgggtgcaggcctgtgaccatcttgctcagtaaggtgacctgtgtgcttcatgtctgctgagtgtgggagacagcaaggggctgagagaagctgcagcaggactgggcctggcatgtgggggactcctttagcagacctgtgttcagctaggaaggtcctacgagcccagcaactatcaggaggtcaacaaaatcatcctcatctcaaagagccagtagtctggctcctccacagattttgtccccaggaggagactcctgggagtactaatggtgcggtgagaggtgggatgtgtagcaaaactagggacacagagaggccactgtctccaacacactgcactgctgagggagcccagtgctacagtgacaaataaggctgaggagtacaggaggcaaacacatccatttaggggccaggtgcgggggctcacgcctgtaatccctaaactttggaaggccaaggcaggaggattgctcaaggccaggagttcgagaccagcctgggcaacatagcaataccctgtctttacaaaagaaaacaaaatccacttgggataaaattctgcttcaggaagattctcatcattcaggcctcagctcaaacatcagcctctagaggtaccaccctatctcaccttcccagttccacactgtcacattctcctacgataaccacaatctgaaactatcaacttcattcattcattagcttcctctctttgtccacccctcaccctccctggtaagctggtaagctcgtggtaagctccataaaggcaaggaccatgtctgtgttgttcaccacgatgcctaacacagagcctgcctgtgcttgataaagtaggtgaaatggatgctgcagccaggcacggtggctcacgcctgtaatcttagcactttgggaggccgaggcaggtggattgcctgagctcaggagttcgagaccagcctgggcaacacggtgaaaccccgtctctaccaaaatttaaaaaaaaattagacgggtgtggcagcatgcgcctgtaatcacagctactcgggaggctgaggcaggagaattgctagaacccaggaggcggaggctgcagtgagccgagatcgccccattgcactccagcctgggcaacagagcgagactccgtctctaaaaaaaaaaaaagaaaaagaaaaagaaaagagaaaaagagaaatggatgctgcaaaggatgtctgcattcacgatgccatcactttagtttctcattggtacctcccaagaatcctgggagatcagctggagagcaaagaaacgggctcagaaagatggcatgaggtacgacaagtagctcaaggttagcagatgatggacccgataatccaagcctggccttctgacttggaacctgtattcctctcaccaccccacgattcccatgtccagcaagcatttctgcagcccccaccctctgcctgagctggacccagtcggggaatggggatgggtgggacaggtagaggacagcaataaaggagacacatcctgcctgcagctctagctggaagagcataccacctagtatcaaagtaggtatgtgctctaacttcatactgttctgtccataaaaaaataaacaatttaaaatgtatattctcttaaaaaataaaaatgcaggccaggcgcggtggctcacgcctgtaatcctacaactctgggaggccaaggtgggtggatcgcctgagattgggagtttgagactagcctggccaacatagcgaaaccccgcctctactaaaaatacaaaaattagctggacgaacacctgtaatcccagctactcaggaggctgaggcaggagaatggcgtgaacccaggagggagaggttgcagtgagctgagatcgtgccattgcactccagcctgggcaacagagcaaaaactccatctctacataaataaatgtattgcaccactggagaggatagtcacacatgcatttaccattcttgacttatctaagagaagctgccatcacgcctctggccccagggtctgttttttggtagtctgagaaccattcaaacacagagacattaagcttccgaatactgctgtaatttttctccaaggaagtcagccttgaactcaaagagactgattttttacaaagtcagccagtctcaagctcggctcagcgtctgctgctctataatcgcaccacagtccacacccttgtttgttgctgaaaaacaataaataaaggaaagggatccaaacagcccagctgatgttcaaaatactcacaataaggacaggaagcctatctaaaacaaatctcaaaccaacctgggtaggtgagggaaaaggcggaagaaagtaaaagctaaaagataattaagggcaagacaagcctggacaacatagttagactccgtctctacaaaaaaaaaaaaaaaaaaaattaggtgggtgtggtgacacccacctgtagtcttagctacttgggagtctgaggtggggggatccactgagcccaggagtttgaggctgcagtgagctatgatggcaccactgcactccggcctgggtgacagagcaagaccttgtctcaatcagtcaataaggaaaggaaagaaagagactaacaattactgaggttctactatgtgctaagcattgggcttcccactttacctacatcatcccatttaatcctcacaactctataaggaaaacaggctcttcccattaaaacaacctgcccaacagagtttgaaagggtcagagctggaatctgaactcttgctgggaggcccttgatgcctgggctttctccaatttacctcactcatttattgttacatcagtaccatttaccaagggattactgtgtggcatccctctgctaactgctctgtgaaaaccaatgaaatccacaggatagatccaaggttaaagaggaaactgaggctcggagaggccaactcacttaccctaagtcgtaaggctaggaagaagtggatctgagctctgaacctaggtctaacgccaaaactccgactcttgcaaagccatcctgctgcatctgctggacagctctactcgaaagtgtttggctaagttagaatgccttatggcggcgcgagcagagttgagttacaaaaattcctgtagtagcaaaattcccatcttcccacaccgaatggggctaggagagctaatctctatatgatgtaagctcaagggccaaggaaagaggctggtcagagacatcggccagtgatgaagcagctgacatcatccctgctgaaaacattttctgagaatacaagatgccttgtagctggtcatagctggtgttttttctgagcacagagccagcaattcattcccagcactctgcaagaacaacaaaatacgctctctgcaaaaacatcgtggttacaggagaccgagacagcccagcgacagaagctgctaatttctccaagcaacccaaggattggaacgccaagccgtgccagtctggtggaaaaaaaaaaaaaaaaaaacccaaaaaacaaaaaaacagcactgtgaatatcctgaacacagagacaggcaggtgcccagagtcaacggctccagtcagcacctcctgcacccacaatctaggtaccttcttgaaaagcaagtcaatggaaaaagagatattgcacagtcagggagccagtggcttctttagttattttttgaacatctaagaggaaagctgtatctgtttagagtcccactgcatggaagtgaagtgattccgagtagctaagcattagcttggctttacctcagctggcccattcaagcagaaatgttccccaagcagcatttgaaggcgccccctctctgcacaggcagacctattttggtctgtgcactgcccctgtccacaggtttacacatccctggtctagctccatcagcctccaaacaggagacggggaagtcagttcaaccccctccacctccccacccacaccaatgcactcgttccaagcaagaggctccgagaaacatccaaggcaccttccactggctgtgaaacaccagaaggtccccacactcctactagattccaaagaaattcacacagagtccttccaaacctctgaaaataacctcagcggtgctgaaagaagcttccctagtggcagctgcctctctcggagaagctctgaaggaagctgtttccctccctgcaggggacagaagctggcggctgctaagtcccagctcggtcattcctacagcctcggggggccacgtcagttgtgaaaaacagcccagtctcaaattctggccccccctacggcttcgtgaattgaatgaagtaacaggaactatcacttattggacgcctgctgtatgccagaggccctgcatgatctcattccatctccactccagccctagcaaccaggttcaatcacttaaataggcaactgaggctcttaagatgaagtgacttatccaaggtcacacagtgagtacaaacccaggtgtgccgccagagcctgaactgggaacccctgcgcggtaactgcctcgtggcgaaatcggggtgtccttctgtttggccagtcgccgaagaggggtgttcctcttgggcggccctgagccaccctcggcgggtcccaggagcctgcgaggcagctcccgggagaatgggggtcctgaggataggctgggggtcccgggagcgccgaaacagcgggcccacctgtagtcctgcctgccgtgagggtaccccgctcccgggccagccgagccctgccgctgtctggcgccccctccgcctggggaagccccgaaggcagtttccgcccgcggccgcccgtcactcaccctgacactgccgccgaggacggcccggccgagggaagcaagcgagaggcgcggctgccgccggagccgggccccgtcgggctctagcctctccggccggctgcaggggtactgagaccagtacccgggggccagcagcgacccggaaacactcggcccggaaatgatgtcaccatgaggcgggcccgaagagagggtggaccacggctgcgcgctggctccgggaagcggtcgatgcccgcggccgacggagactacaacccagaggcggaggacaaagcggaaggccgaagagcgaggacgaaaccggcggaaccgcactttggagcctaacgagccatcgctgcgtctgagactgggacccggaagtaaacaggccggacgtgacgcaagccgctcggcctagggatggtggctggccgggttgtcatggaaaccgctcaggagcagggagctgggagctatgagtgctgactgcgtgaactcggcctccacttcccggacctgccacttatcatgatccacgagctgtactcatgactccgcacaagcaagcaggggctgacggtcggatccctcgcccccattttacggacagaagtaccgaggctcaaagagagccagtgagatgctgaaatcacgcgtgattggaatccagccttgctagggctgcgggtgttacgggccgtgggcggcggttaagagcgtgggttctatttttagttttgccacttactagctgtgtgaccttggacaagttacctaacctctctgagcctcagctttctaacctgtaatattaaataataaagccaggcgtggtggcacgcgactgtagtcccagctagtcgggaggctgaggcgagaggatggcttgctcccaggtgttcgagaccaacctgggcaacataacgaggccacgtctcttaaaaaaaaaaaaaaaaaaaaaaaaaaaaaaaagccgggcacggcggctcacgcctgtaatcccagcactttcggataaactatatatatatataatctgacatccccaccagaccctgagcttcttattcatctatttccccccgagctctgcacatgtctgatgaggaggcacacaacagatgttcattgattgtaggattctcactctgagtcttggtgaccccagctaaaaccggtggggcttgtgtgatgagtcagtgacacaatactgggaaacgtttggagaaccagcaatctgctgctgtccaaacagtagcattactgtgtttacctgtcgttgcctgagcaccgctcaaagtccctgtgttctttatcagctcatgtttaagctcctctcttaattatctgcaatgtgatgatgttcacaggaattccatctgagacaaactgtcccaccttaagtctgcctcttacagcaactcagcactctggtttggtagctcttacaatattgcattttcacgtggggctgcttaaaaaagtcccctccagctctgtgggtctatgacaggcaaaagagaaacaaagattttgaagaagggctttaccagtaggaaaccctggtcatcatctactatcagaaaagacccaaagtctccaaagacagtcacatttctcagttttttttttttttttttttttttttgagacggagtctcgctctgtcacccaggctggagtgcagtggcacaatctcagctcactgcaagctccgcctcctgggttcacgccattttcctgcctcagcctccggagtagctgggactaccggcacgcgccaacacgcctggctaattttttgtatttttagtagagatggggtttcaccaaggtggtcaggatggtctccatctcttgacctcgtgatccgcccacctcggcctcccaaagtgctgggattacaggcctgagccactgtgtccggccatgtttctcatcttttaaacacagttgaaggcttgtgatttctctacttggtgatgtagaaatgacaggagcgtcctttcccgactttattatataatgattaccagattatgtaagggtcacgtgacaatgattaggcacttctacttccgaagagccaacaacacgaacaatctacctacctctttctattttttagtttttttttccatcaccaaagtaatacatgattccaacaatacagaggagtatagaacaaaaagcaaaacagaaaagctaccccatgacccagcaattggatttctcaaaatctgctagagaaacatacactgtgcccaaagagacctcttgcatcattgtttctaatgcaaaagcaataataggaaatatttaaatctccatcactggggtaatggtatatccatactaacaaatactgtggatcacttaaaaagggtgatgcatggccaggcgcggtggctcacgcctgtaatcccagcactttgggaggccgaggtgggcaaatcacgaggtcaagaggccgagaccatcctggctaacacagtgaaaccctgtctctactaaaaatacaaaaattagccgggtgtggtagcaggcgcagtagcgggtgcctgtagtcccagctactcgggaggctgaggcaggagaatggcatgaacctgggaggcagaggttgcagtgaaccgagatggcaccactgcactccagcctgggctacagagtgagactctgtctcaaaaaaacaaaacaaaaaaagtcaactggggacaggaacacagatacagatatctgtctttcattccacaaacacacatttatgtgatctgtattaatatctttctcccccagaagtcagtgaactccatgaggacaaaactatgtctgttttgttcacaattatattactactacctgacatatatgcactacctagcatgcaataggttgttcaacataatttgtttctgaccagaattttcactgaatacctaccatgtgccaagtttgatgtcagattttttttttttaattgagacagggtctctcactctgtcaccctgtctggagtgtagtggcatgatcatagctcactgcagcctcaacctcctaggctcaagcgatcctcccaccttagcctcctgagtggcggggaccacagttgcacaccaccacatctggctaattttgttaactgttttgtagagggagggtctcgcaattttgccaaggctgctctcaaactcctgggctcaagtgatcctcccaccttggcttcccaaggtgctgggattacaggcatgagtcaccatgcccaccctgatgttaggtttaaagggcataactgtgagtgagacagacacagttcctgccctcacagagcatccagtctccttaaccgaaagagaatattcataacataggagtaggattaataaaaccctagaattcaggatagaagatggtaaatgatatgagaggggtatagagcttagagcatggagaagtgacctctgacagggtaaatgaaggatagcctccaggaggaagtagcatttgagctgggctttgagtgacctggacatgtgaggctgtccagctttccttccagctggagtaaagggagcaatcaaaggcaaggacctgagatcaaaaactcggctacctgtggctgggctcagtggcacaagcctgtaatcccagcaatttgggaggccgaggcaggcggatctcctgaggcccagagtttgagaccagcctgaccgatacagtgaaaccccatctgtactaaaaccacaaaaattagccagcctgtagtagtgcccacctgtggtcccagctactcaggaggctgaggctggagaatcgcttaaatctgggaggtggaggtggcagtgagccaagatcacgctactgcactctagcctgggacacagagggagaccctgtctcaaaaaagcaaaaacaaaaacaaaaaacaaaaacacaaactcagctacctgcaagcacataatgtgggcaaatacgaggtactagagtactatagcctcacactgcgtaggaccagaaatgagtaatgtaatctaacatggtacccggctcacagtaggcatccaataagtacttcagtgagaaaacaaatattgttgaattccttccatgcttcagctgacttgtggccaagatccccactcaccaggaatgaccagatactctgatttttggagaggagttagagatccagattgtttgtttatttatttatttaaagataaggtcttgatctgtcatccagactggagtacagtggcatgatcatggctcactgcaacctcaaacttctggactcaagggatcctcccaccccagcctcccacacagctgggactacaggctcatgccatcatgcccagttaattattttctgaagacgtgggatcttgctgtgttgcccagggtggtctcaaactcctagcctcaggtgatcctcccactttgacccaccaaagtgctgggattacaggcaccagccactgcgtccagcctggaatccagatttttaaataaaatttcttaattataaacaatatttgtaaatatacctcctgtttctacctgttgagagggcctagaagaaatggcacacctgtagcaacaagcacgtagactaagactaaccagatcttagtccatggaaccagggcttcctggagaaatggctgattcccaggggtaggtcagggaaattacaacatgaggttggaacatgttattgagccagaaagtaggaagtgcccaaagaatgatgggacatgttgaaagcacacaaaagccaggatggagggtccctattggccagatatgggcaatgtgagtatcaaaataaataataataacagattataaaacttaattgtggggagagaagttatgagcccatactaatgctaaacataaaatatcatgcttcatccaggcatggtggctcatgcctgtaatcccagcactttgggaggccgaggcaggtagatcatctgaggtcaggagcctggtcaacatggtgaaaccccatctctagaaaaatacaaaacaaaattagctgggcatgatggtgggtgcttgtaatcccagctacttgggaggctgaggcaggagaattacttgaacccagaaggtggaggttgcagggagctgagattgcaccattgcactccagcctgggtgacagagcgagactctgtctcaaaaaaaacaacaacaaccatgttttattttttattttttaggctagtcaagtgaagcaatgggaatggagaagaaacaaatctataactggttgtgatgaattagtcgtaagcaccactgcaattggaccagtcaataccatggttatcacaggagtgtggctgaggctgtgtttggccctgggtgccaggtctgcaccctgcactaaggatgggtgaggaacgacaggcagtcgagctggttggtgctacaggtaacgatagtacctaccaaaatacaggttaaatgagatagtccttgtgacatgataacatgttaattactcaattagcattagctatcatgaatcaatccttttatatgttttaaagcctagagaagcactttatccatagtggctgcttattacatttattacatttctcttgattgaatgaaatgatacagttttgctaactactagctcttacttcccatactgttttcttttcaggatcctcactctgatctaagagcataatttaattgtgttgtcagacagcttatcttcagggttatgacatggagtcagactgcctgggacatcatatttatttatttatttatttatttatttatttatttatttattgagacagggtctctgtcacccaggctagagtgcagtggtgccatcttggctcactgcaacctccacctcccaggcttaagcaatcctcctacctcagcctcccaagtaactgggactacaggcatgcgccaccatgcccttgtattttttgtggagacaggatttattcatgttgcccaggctggtctcaaactcctgagttcgccctctccctctccctccccctccccctccccctccccctccccctctccctctccccacggtctccctctctctctctttccacggtctccctctgatgccgagccgaagctggacggtactgctgccatctcggctcactgcaacctccctgcctgattctcctgcctcagcccgccgagtgcctgcgattgcaggcgcgcgccgccacgcctgactggttttcgtatttttttggtggagacggggtttcgctgtgttggccgggctggtctccagctcctaaccgcgagtgatccgccagcctcggcctcccgaggtgcagggattgcagacggagtctcgttcactcagtgctcaatggtgcccaggctggagtgcagtggcgtgatctcggctcgctacaacctccacctcccagcagcctgccttggcctcccaaagtgccgagattgcagcctctgcccggccgccaccccgtctgggaagtgaggagcatctccgcctggccgcccatcgtctgggatgtgaggagcccctctgcctggctgcccagtctggaaagtgaggagcgtctctgcccggccgccatcccatctaggaagtgaggagcgcctcttcccagccgccatcacatctgggaagtgaggagcgtctctgcccggccgcccatcgtctgagatgtggggagcacctctgccctgccgccccgtccgggatgtgaggagcgtctctgcccggccgccccgtctgagaagtgaggagaccctctgcctggcaaccgccccgtctgagaagtgaagagcccctccgcccggcagccgccccgtctgagaagtgaggagcccctccgcccagcagccaccccgtctgggaagtgaggagcatctccgcccggcagccacctcgtccgggagggaggtgggggggtcagccccccgcccggccagccgcccggtccgggaggtgaggggcgcctctgcccggccgcccctactgggaagtgaggagcccctctgcccggccagccgccccgtccgggagggatgtgggggggtcagccccccgcccggccagccgccctgtccgggagggaggtggggggggtcagccccccgcctggccagctgccccgtccgggaggtgaggggcgcctctgcccggccgcccctactgggaagtgaggagcccctctgcccggccaccaccccgtctgggaggtgtacccaacagctcattgagaacgggccatgatgacaatggcggttttgtggaatagaaaggggggaaaggtggggaaaagattgagaaattggatggttgctgtgtctgtgtagaaagaggtagacatgggagacttttcattttgttctgtactaagaaaaattcttctgccttgggatcctgttgatctgtgaccttacccccaaccctgtgctctctgaaacatgtgctgtatccactcagggttgaatggattaagagcggtgcaagatgtgctttgttaaacagatgcttgaaggcagcatgctccttaagagtcatcaccactccctaatctcaagtacccagggacacaaacactgcgcaaggccgcagggtcctctgcctaggaaaaccagagacctttgttcacttgtttatctgctgaccttccctccactattgtcctgtgaccctgccaaatccccctctgcgagaaacacccaagaatgatcaataaaaacaaacaaacaaacaaacaaacaaacaaactcctgagttcaagcaatccacccgccttggcctcccaaagtgctgggattacaggcgtgagccactgcgcccagcctcatcatctttctaagcctcagtttccccacctgtaaaatggagctgatcatagtatcttcttcataaggttattttgcatattgaatgggataacatgtgcaaagaagttcccccagtgcctggaaggcagtgatcctgcagcaaatgttatccacgattaggattcttgttgtcccacatgaatttgctgggtgctacagattctgtctggctcccaaagctcagaattcattctggcctcccacgggtggaggcagggtttgggggaggtttgtaactctaaagatggcacgtcttgaactgaaagctggcgctgtcaagcttcttcacaatcagtaagaacggctttcttcccccttttccctaaatataaacccaactgccaatcgctttaaagtcttcatgtctgcagcaggagcaacccacgagtccaaaggtgaggcagctggcagagggctgttgttagtgggatccacccagcccagcccagctccaaggagacacacttcatgggactggatgtgggcaactcagcatttcttccttatgattcttaattgctcctgaaaacagtaaccccaaagttacgagccccagtgtgtactataacagtctcttaaagtactgggtttcagggctgggcacagtggctcacttgtgtaatcccagcactttgggaggccaaggcaggaggatcacttgaggtcaggagttccagaccagcctggccaacatagtgaaacaccatctctagtaaaaatactaaaattagccgggcatggtggcgcatgcctgtaatcccagctacttgggaggctgaggcaggagaattgcttgaaccaggaggcggaggttgtagtgagccgagattgcaccactgcactccagcctgggcaacagagcgagactccatcgcaaaaaaaaaaaaaaaaaaaaaaaagtattgggttttagaagacggcttgctggaagcaaacatctttgtccttccctctcccttgaagcaagcaaaggaaagccacacacaggttgtccttattacatagcaacattatccctaggccagaagtcgaagtaggctctggagccgaaaggcttaagttcagatcctagccctgccgctttccatctgtgtgaccttggacaagctatctaacctctctgggactgcctctatttccttatcagtaaaatgggattaatagtacccctgaggattattgagagattaaatgagctaataatatacgatgccaagtgcagagtgagcattcaacacaagctagatatgactgactcagtcacagggcttgccaggctggggtgtagagtcagcctcagaccaatggggaacataatgggacttatgccattatggtcaggccttgacaccttgcatttatgctgctcaaaagaggaggattttggctaggggccatggctcacgcatgtaatcccaatgctttgagagggcgaaactggaggattgcttgaggccagaagttggagaccagtctaggctacatagtaaagccccatctctccaaaaaattttaaaaattaggtagacacgtagcatgagcccatagtcctagctactggggaggctgaggtgggagaatctcttgagcccaagagtttgaggttacagtgaactgtgatggcaccactgcactccagcctcagcaacagagtgagaccctgtctctaaaaaaaaaaataagttaaaaaaagtgtagaattgtataatatccagaatatatgaagaatttctataacgcaacaacaaatagacaacccaatttaaaaatgggcaaaggtggctgggcatggtggctcacacctgtaatcccagcactttcggaagccaaggggggtagatcatttgagctcaagagttcaagaccagcctggccatcatggcaaaatcccatctctactaaaaatgcaaaagttggccgggcacagtggctcacacctgtaatcccagcactttgggaggccgaggcgggaggatcacctgaggtcgggagttcaagaccagcctggccaacatggtgaaactccatctctactaaaaatacaccaggagcagtggatcatgcctgtaatcccagcactttgggaagccaaggtgtgtggatcacctgagtttgggagttcgagaccagtctggccaacatagtgaaaccccatctctactaaaaatacaaaaattagccaggcatggtggcatgtgcctgtaatcccagctacttgggaggctgaggcaggagaatcgcttgaacccaggaggcggaggctgcagtgagtcgagattttgccattgcactccagcctgggtgacaacagtgaaactctgtctcaaaaaaaaataataaaaaaatttttttaaaaatacaaaaattagctgggtgtagtggcaggcccctgtaatcccagctacttgggaggctgaggtgagagaatcatgtgaacctaggaggtggaggttgcagtgagccaagatctcaccattgcactccagtctgggcaacagagtgagattctatctcaaaataaataaataaataaaattaaaaatgggcaaaggacttgaatagacatttctccaaagaagatacacagatggccaataagcatgtgaaaagatgtgtgtcatcactaatctttagggaaatgtaaatcaaaaccacagtgagattccacttcaaaccctctagggtggctataataaaatgtttttgaaaaggaaaataacaaatgttggcaatgatgtaaagaatggaatactcgtacttgctggtgggaatgtaaaatggtgcagccactgtaaagaacagtctggcagttcctcaaaaagttaaatacagaatgaccatatgactcagcaattctgctcctaggcatatgcctgaaagaattgaaaataaggactcaaaacagacacttgtacatcaatgttcattgcagtattattcacattagccaaaaggtagaaacgacccaagtgtttgctgacagatgaatgaataaacaaaatgtggtacatccatgcaatggaatattattcagccttaaaaagtgaggaaattccaatgctacatcatggataaaccttaaaaatattatgttaagtgaaagaagccagtcacaaaaggacaaatattgtgtgattccactagatgagatgtctgtaataggcaaattcatagagacagaaaaaggattagaggttaccagtggctggagagggaggaatggggagctatttcttatagatggagtttctgtttaggttgctgaaaaaattttggaaacagaggcgatgtttgcacaacattgtgaatgtaattactgccactaaagtatatgctttatggtggttaaaatggcaatttttatgttatgtatgttatcacaataaaaaaattttggggggggccaggccagtggctcacacctgtaatcccagcactttgggaggctgaggtgggtggatcacttgaggtcaggagttcgagaccagcctggccaacatggtgaaaccctgtctctactaaaaatacaaaaaaaaaaatagctggatctcatgacacccacctgaaatctcaggtactcgggaggctgaggcaggagaattgcttgaacccaggaggtggaggttgcagtgagccacgatcacaccattggaatccgtgcactccagactgggcaacagagcaagaccctgtctcaaaaaaaaaaaatggtgtggctgggcacagtggctcatgcctgtaattccagcactttgggaagccaatctgggtggatcatttgatgtaaggagttcgagaccagcctggccaacatggtgaaaccctgtctctactaaaaatacaaaaaaattagctggacgtggtggcacacacttgaaatcccagctactagggaggctgagggagaagaattacttgaaccgggaggcaaaggttgcagtgagccgagatggtaccactgcactccagcctgggaacaaagtgagactccatctcaaaaaaaaaaataaataaataaataacagaagatctggacagacacttcacagaggtaaaacatacaaaatggccaataaacaaatgaaaaggtactcaacgtcattaatcattatgaaatctaaaattgcacagtaccactacacactcactagaatggctaaaagtgtctgacaaccaaatgttggtgaggacgtgaagcaactcataccttgttagtggtcatgggaaatagttggaaaatggcttggtttggcagtttctaataaaattaaacacacattggccgggcacggtggctcacgcctgtaatcccagcactttggaaggccaaggcgggcagatcacctgagatcaggagttcaagaccagcctggccaacatggtgaaaccccatctctacaaaaatacaaaaattagccgggcatgatggcaggtgtttgtaatcccagctactcaggaggctggggtggaagaatcgcttgaacccaggaggcggaagttgcagtgagccgagatcgtgccattgcattccagcctgggcaacagcaagactccatctcaaaaacaaacaaacaaaacagacaaacaaacaaacaaaacaaaaaaaattaaacacacatttacgaaatgacccggaaattctacttctatgtgaatgcttagttttgaaatgtcttgttaattgtgatgactttcttctatccttagccaatgtctcaagtcacaatatacacatgaggtgcagtttattgtagatgaaggtggattcaaatcccctatttcaatgtcttcttgttagtactcattatttggttgtagttcttgtcagatattatgagatcgttatgtttttacctcattatgtggctgacccttgatataatagaaactgtaaaatgctatgagctggtgggataactgatgaaatgcaattttctggaggcagtttttttttaatttttttttttgagacaggctctcactctgtcgcccaggctggagtgcagtggcgcagtcttggctcactgcaacctctgcctcctgggttcaagcgattctcctgccttagcctccttagtagctgggattaacaggcatgcgccaccacacccggctaatttttgtatttttttggtagagactggggttttaccatgttggccaggctggtctcaaactcctgacctcaagtgatacaccggcctctgcctcccaaagtgttgggattacaggcgtgagccgctgcaccctgccaggggccgcatttttatgtgatcatccccgcgtggctttcctgtttgagactgaataattcactgttacatttccaacacttaccaggatacttagcacatagagttattggttgaatgaatatttacatgccagtgtctcctctgttaagactccttttaggctgagactctttttttttttttttaatttttgttttcaggcaatgtacagtaagccatgatgggcagaggcaggaaatacttagagaactggaaagaataaaggagccggtgttctcttcgcagggcccggtgagtctgtgagatgctcacacgccccctggtggtgtcagtaggaattcttcctggcgctcagcaatttggcaatcttgaagaaccggctgaaatcaagatgaaattatctgcccacaggtttaaaaatgtagcaatacatgatggggtaaattatgcctaacttagacaagtatagcgataaattttacatgtggcctgaggctgatagaactgtgacgcctgagagttacaggatttgagggctggagttacttccgattcatcttaactgttcttaatgcatcattgtttattttttctttttttaagagaaaaaaaagtcacccaggctggagtgcaatagcacgatcatggttcattgcagcctcaacgtcctggggtcaagcagtcctcctcagcctccccaagtgctgagcccacatgtgcatgcccctatgcccagatattttttgtattttttgtagggatgggatcttgctatgttgcccagggtggtctcgaactcctgggctccaggcaattgccttagcctctcaaagtgctgggattacagatgtgagccacctcacctggtcccgaatttttaattaaaaagtggtgcatgaacttgatataaatatttagacaacacaagaggaaacagaaggagaagtctttctccaggcccagaacctaagacccagtcccttagctccccttttgttttttggttttttgtttgtttgtttcttttcatataaaatagagacagggtcttgccatgtttcccaggctggtctcaaaccgccaggctcaagtgatccacctgccttagcctcccaaagtgctgggattacaggcatgacccaccacacccgggccattttccctttctaataggaaccattggtaccagattctcagaaatcttcccaggaggccgggcgcggtggctcacgcctgtaatcccagaactttgggaggccgaggcgggtggatcacctgaggtcaggagttcgagaccagcctggccaacatggcgaaatcccgtctctactaaaaatataaaaaaattagccgggcgtggtagtggacacctgtaatcccagctactcaggaagctgaggcaggagaattgcttgaacccaggagatggaggttgcagtgagccaacatggtcccactgcactccagcctgggtgagagtgagactccgtctcagaaaaaaaaaaaaaaaaatctttccagtagggcaattgactcatcctgttttgcccgggactttcccagttttggcactgaaagtctcacatcctgggaaacccctcactcccaggcaaacctggacacttggtcaccctactttccaaaggcatctatttatcatatacaaacatatacatatattagttgcattacttggcatcttgatgttgttttaattaaaaatattttttgggccaggtgcagtggctcacacctgtaatcccagcactttgggaggccaaggtgggcagctcacttgaggtcaggagttcaagaccagcctggccaacatggtgaaaccccgtctctactaaaaatacaaaagttagccaggtgcagtggcgcatgcctgtaattccagctactcgagaggctgaggtaggagaatctcttgaacccaggaggcagaggttgcagcgagctgagatcgtgccactgcactccagtctgggtgacagagcgagactccattttaaaaaaaagttttatatatatatatatatatgagatgattcaatatcagcttcatatttatttaacaaatatttatgtaattacctagcatgcaccaggcattattttggaagctgaagataacagcagtaaacaaaattgacaaaacctcctgacctcatggaattgatatactagtaattatatctattgcatttgtttaatcacccccaatcatcattttggttgcttccagtatcttcctagtgtgacaacgctgtcctggatatccgtgtgcatgtagctgtctcacatgcatgagggtatctatagcagcgctgtccaatagatcttcctgcaacgatggaaatgttctgtgtctgatcttttcaatatgtagccacgagtcacttgtggctattgagcactagacatatggctagtaagactggggaatagaattttatattttatttagttgttttgttttgttttgagacaaagtcttgctctgtcgcgcaggctggagtgcagtggtgcagtctcagctcactgcaagctccgcctcctggcttcacgccattctcctgcctcagcctcccgagtagctgggtctacaggcacccgccaccaggcccggctaatttttttgtattttttagtagagacagggtttcactgtgttagccaggatagtctcgatctcctgccctcatgatccatccacctcggccttccaaagtgctggggttacaggtgtgagccactgcgcctggccttttttttttttttttttttttttgagaaagggtctctgtcagtcaggctggaatgcagtggcacaatcatgtttcactgcagcctcgatctctagagcttaagcaatcctcccacttcagcctcctgagtagctgggaccacaagtgtgcaccaccacacgtagctagttttttttatgtagagatggcggggtcttgctatgttgattaagctggtttcaaactcctggcctcaagcgatcctcccatgttgacctcccaaagtgctgggattacaggtgtgagccactgcacctggcattaattttgtttttttttttttttttgagacagggtcttgctcttgcccagactggagtgcagtggcaagattacagctcaatgatgctttgaactcctgggctcaagcaaccctcctctgagtagctaagactacaggcacatgccactgcactcagctaattttatgtttgtttgtttgtagacagcagggtcttggtacgttgcccaggttgatcttgaactcctggcctcaagtgatcctcccacttatttttgtattttttgtagagatgggggagggagttgggggtggtggggtgtctcactgtgttacccaggatggtcttaaacccctggacaaaagtgatccacccccctcagcaacccaaagtgctgggattacaggcgtgagccaccatgcccagccctttcttaaatttaagcaaacaaattttaataatgatggctgactcctgtaatcccagcactttgggagaccaagacaggaggaccatttgagctcaagagttcgagaccagccttggcaacatggtgaaaccctgtctctacaaaaaatttaaaaattagctgggtgtggtgtgcacgcctatagtcccagctacttgggaggctggggtgggaggacggcttttgcccatgaggtggaggttgcagtgagccaagattttgccattgtcctccagcttgggcaacagagccagaccctgtctcaaaaaagaaaaaaaaaagcctaggcaacatagtgagaccccatcactacaaaaaatagaaaaaatagctaggtgtgatggcacatgcctgtagtctcacctactcaggaggctgaggcaggaggatcacttgagcctgggaagtcaaggctgcagtgagctgtgatcacatcactgcactccatcctgggtgacagagtgagactctgtctcaaaaaaaaaaaaaaaaaaaaaaaggaaagaaagaaagggagggaaggagggaaggaacaaaggaaggaacgaaggaaggaaggaagggaaggagggaggaaggaaggaaggaaggaaaaaaggaaggaaaaatttaggctgggcacaatggctcacgcctgtaatccctagcactttggaggccgaggtgggccgatcgtgaggtcaggagatcgagaccatcctggctaacatggtgaaaccccgtctctactaaaaatacaaaaaaaattagccgggcgtggtggtgggcgcctgtagtcccagctactcaggaggttgaggcaggagaatggcgtgaacccaggaggcggagcttgcagtgagccgagattgtgctactgcactccagcctgggcaacagagcgagactctgtctcaaaaaaaaaaaaaattaatttaaaagaaattttttttgagactgagtttcactcttgttgcccaggctggagtccagtggctcgttctccactcactgcaacctctgcctcctaggttcaagcgattctcctgcctcagcctcccaagtagctgggactacaggcatgcaccaccaggcccggttaatttttgtatttttagtagaaacagggtttcaccatgttggtcaggctggtcttgaactcctaacctcaggtgatccacccgcctcagcctcctcctgctgagattacaggcatgagccgccatacccagctttttttttttttttttttaaagaacatgattcaactgtattgctctctataagaaactcactttatagactggttctgaaaggatggaaaaagatatttcatgcaaatatctttttgcgtgaccaaagaagaggagggctggcaatactaatatcagaaaaattacttgtccaggccgggcacggtagctcacacctgtaatcctagcactttgggaggccgaggcgggtgcatcacctgaggtcaggagtttgagaccagcctaaaaaatatggtgaaatcctgtctctactaaaaatacaaaaattagccaggcgtggtcgtgcatgcctgtagtctcagctactcaggaggctgaaacaggagaatcacctgaacccaggagacagaggttgccgtgagctgagatcacaccactgcactccagcctggacgacagagcaagaccctgtctcaaaaaaagaaaaaagaaaaattacttgtccaaaaggttacaagagataaagaaggcattgtatgttaataaaaagttcaatacagcaagaagatataacaattataaacatttatatacctaataacagaccatcagaacatatgaagcaaaaattggtagaattgaaggaagaaatagacaattccacaataatagttagagacttcaatgccccactcccaagaataaatagaacaaacaggagacaagtaaggaaataaaggacttgagcgacacagtaagacaaccaggtctaacacatgtacagacactccccagcaacaacagcatccacattcttctcaggcacacatgggatatcctccaggatggaccatatgttaggccacagattaagcctcaagagattttaaaaggtagacatcagccagctgtggtggcttaggcctgtaatcccagcactttgggaggctgaggcaggaggattgctcgtgcccaggagtttgcaaccagcctgggcaacacagccagacttcatctctacaaaaagagacagaagaaaaggagaaagagagaaagataagaaggaaagaaagaagaaataaaagagatcataccaaatatcttctccaagcacaattggataaggctagaaatcaatatgggggggttaaaaaaaaaaagaaatcaatatcaaaggaaaactggaaaattcacaaatttgtggaaatttacacactcttaaaagaaccaatggatcaaagaagaaatcacaagggaaattagaaaatactcagaaacaggccaggctgggtggctcacacctgtaatcccagcattttgggaggccgaggttggcggatcacttgaggtcaggcgtttgagaccagcctggccaacattgtgaaaccctgtctctactaaaaatacaaaaattagccaggcgtggtggcaggcacctgtaatcccagctacttgggaggctgaggcaagggaattgcttgaatccaggagagggaggctgcagcgagcagagattgcaccaatgcactccagcctgggcgacagagtgagactccatctcaaaataaataaattaattaaataaatagagaaaatattgagaaacaaatgaaaacaaaaacacagcatgccaaaatttactggacacagtgaaagcagtgctcaggggaaattttatagctataagtgcttcaaaatcatagacagaaaattgccagggcctgggggtatggggatgggaggagggaagaggaagttattgtttaatggggacagaatttcagtttcagtttagcaagaagaccagaattttagagatagctgatggtgatgattgcacaatatgaaatgaatgtactttgttgttggggtttttttgttttgttttgttgttgttgttgttgttttttgagagggagtctcgcgctgtcgcccagactggagtgcagtggcaagatcttggctcactgcaagctccgcctcccaggttcaagccattctcctgcctcagcctcccgagtagctgggactacaggcgcccgccaccacgcccggctaattttttgtatttttagtagagacagggtttcaccgtgttagccaggttgtgtttttgtttttttttttttttttcagacggagtttcgttcttgttgcccaggctggagtttagtgactgttggagtgagtgagccatcttggcccacggcaaccttcgcctcccaggtcaaaggcttttcctgcctcagcgtcctgagtagctgaggctacaggcatgggcaaccacgcctggctaattttagtattgttagtagagacggggtttcaccatgttggccaggctgctctagtactcctaggctcaagcgatccgcccacctcggcctcccaaagtgctgagattacagaagtaagccaccttgcccagctcctttgtataaataaatgatattgattttcttcttgcagctcaggaattagatctgttattagaatttgcttaaatttaagaaatggctgggtactgtggctcaccgctgtaatcccagcacttcgggttgccgaggcaggcggattgcttgcgtccaagagttcgaggccagcctcggcaacacagtgagacccgcccgctctctgcaccactccttccccccctcctttccccgtctctacaaaaaatacaaaaataaataaattagtccggcatggtggtgactgcctgtggtccagctacgcaggaggctgaggtgggaggatcgcttgaaccccggtggtcgaggctgcagggagccatgatcgcgcgcgccactgaacaccagcctgggcgacaaagcaagaccttgtcccaaaatagattaaataaataaataaataaatttaaggaaaaagcaacttgattcgaagataaatagtgatagtgcaagtggtgccgaactaacgataaatttggaaaacagcggcccacgcgcagagcccgtcccaattctggcagcctttggatttggcttccacgttttccagatttccctcggcctctagctcgcttgcgtcagaggggccccgaggggcggcccacccgctagccccgcccccaaccgctcaccgccccgcgagccccgccccctcggcctcctcctcatcggccgccgttgcgcggcgcagagcggcagcaagatggcggcgcaacagcgggactgcgggggtgctgcgcagctggcggggccggcggcggaggctgaccccctaggacgcttcacgtgtcccgtgtgcttagaggtgtacgagaagccggtacaggtgccctgcggacacgtgtaagcggcgagcccgggcctggtcggggggcgcttaactgggaagggaatggagccgaggagcgagatgggtctcagggcgggagccagaggacccacccagaggggcctcccgggggtgtcccccggggctcctaagggccgtgaaagctgccggggcgctcttctgtcccgccccgctcactcctaagtatcccgttcctccgcccgtcttagcggggcagctgctgtctgttgagcgcctgcgatgttccaggcggcctgtcagtctccttcccacacgtgatagtggactcgtgccctgcggggactttaggctccgaagtccgcccttggagagccgacgtttcctttctagtccacgtcgctcttaaagcataggacatttggcgtcgtgtctagctgtggcgagttattctactgtgcactaaagtcgggagaaacgctgaactagactaaaacaacaaaagggaagtctttatggggatctggccagtttgcccttagctgtgaaaggggggtgggagttggcagatgggattgttagcattctacttcctgtgtaggaggtttgtttctttcagttttcaattaagccttcatgacctgaatattgtgaatagagtggttataatgattaaagcagatatgtgtataaatgtccagtccaggtcctgggctgtggccggggctttcgaggttggtcaggttggtcgatttgaatctaagccttgttccatcagacgcacaaacacatctgagttgaaagaattgtagacaacgtggccacctgcttcttgcctcagaattggcttttcctctggcccctctcagtgcttatcgtgggatcaccttggcattggtcttggcagcgggcacagtagccattgcactccatgggcattattctatagccaccctgcagcgggggagggttggcagccattttacaggtgaatacactgagggtccgaggctctcttagggaagggtcaccgtggcctagctcttcccagatgtactgcaggtgaccatttcagtagtccagagaacagtgcttggcacctagctggctgctttttgcttcatcatgttgctttaggctattcatctttgcaattcggttagcctggaactcttccccccacccctcccttttcaggcttcaagtcccaggttaagttacctcaccaaataccatccccatctaaattacttcccccacttcctttctgggacttaacttccttctccttgcttgcacagagcaaaacttaacagctcatgacggagtggccatatctttattgcccctgaactgactggaatggcctctgtgtgccagattttggggtagactctgccttcagagtttacagtccagtgaattgattataaataagtaccaatgactggtcaaactattgtaaaaattcattctgcaagtgggagggtatttcagggatcacacctctgtgcgtggggtgagtgatcaggtaatggttgaatgaactaataagtcgtgtaagcaagcttcacgagagttgaagtggtctttagctttttcattgaatccacttatccttggatcagatttacctgattttggattaattcagtggatttcatttactattaacatttgtaaaaaggctagacccagcacagtttgctaaatgaagagcagcaaaatttgagattttcttgagcttggtgaacctttcctaggtcagagggcaaggaacagtactggttttcaaaccttggctcttctctatcctcgctgtcctagccccacgtgatcagcagttcagtgcaaattgaagacagatggaagcacctctgtgagggcagcccaaatccccgctagctccaaccgactgctttctcctgtgcctagttgatttttaccttttgtgcttggaaagttgagcatcactgcaactctggctggggcattggatttttataaaactttatttcaagccctgaatgactgtgttctccaatctggtagaatacagctggagaaaggcagctggctgggtgcccaagagaagggaatttcttcctagcactgtgacggagtggagcatcggaaggctgaactagaaaagggcgcataagtaggaaatagaaactgaaaagccatcccaggatatttgagttgttcaaaagcaggctggtagtttgggcatgtctcaggcacaaagtgactcgtgaacatttgatagatgagctgtacctgtgtgtgtgcttgagaagagacttcgagctgcttttatctgcatgctgggtttggttccattatactcactggaccctctgtgctctcttgggttcctcttgtcatctgcctttgtgaacaggcaacacaagtgatggccacaggccctgcctgtctctactgcctcatcacttgcccttctcaccatggtctaccgcatcatggcccccaaggtctgcctgccttcctttccagtcctcatttgtgtgtggcgtgatcttggtgtggagctctgcacccagatctgtgtggctgtcctcgtaatcaggtcccacccagctcaaatgccaactcctcagaagcagctttctatgatcaccccagctggtctgtttgccatatttccttcatatttttaatcactatctgaaattaacatttgtgtttcccttcactctagaatgtaagcatcatgagaacagggctttgtcaagtttccattgccctcagtggtgaatgaatagactccctcaccttctctgtacctggtctggaattttgcctaacagcattaacatctaacttaatgacaaggaggaaggagattcttagaggcagtagaaaatggtcaagtgttcagaagatggcctttcattatatatctttagttctttctggcagatttggttatactgtcttaatctatcaggttgggtaagtagcccagggtgtcttctccattctttctgtatgccttatctcagcattaccatcttcctaggcttcaggataggaactcggtcatctttgacttcttttcttcaaagtcagtaagttatcaagtcctcctgattctacctttctgtgaatggtttcctgaattcatcccctgctgcttcagtcagaccctcacaatcctctgcctttagccatctgtttggtttctactttgtctcttctcaccttctcacctaaaaaaaaaaaaaactatagggctgggctcagtggctcacacctgtaatcccagcactttgggaggccaagacgggtggatcaccagaggtcaggagttcgagaccagcctggctaacgtggtgaaaccccgtctctactaaaaatataaaattagctgggtgtggtcatgcgcgcctgtaaccccagccacttgggagtctgaagcaggagaatcgcttggaccggggaggcagattttgcagtgagccgagattgcaccattgcacttcagcctgggcaacagagcacgactctgtctcaaaaaaaaaaaaaaaaaaaaaagtaacaaaactttgttttccatgatagcacagagatatttttctgaaacctggatttggccttgttttgttaataccttccttttaaactcctggctccctactgtttatgaggaaaagtctgttagatttttatttcctcagatacatatcaattttaagcctaaattaggcctagaatagtcttcccttcctctgctagctgacctctttttttaaaatgccagaggggtaatgggccaacatctgtaacaaggttcgagggtggcacatctcacacatgcacatgaacacccagtcctcaggttcatgaactacaaaaggatccatctgaacccttttttttttttttttgagacggagtctcgctctgtctcccaggctggatggagtgcagtggcgcgatcttggctcactgcaagctctgcgtcctgggttcatgccattctcctgcctaagcctcccgagtagctgggactacaggcacccgccaccactcccagctaatttttgtatttttagtagagacggggtttcactgtgttagccaggatggtctcgatctcctgaccttgtgatctgcccgcctcggcctcccaaagtgctgggattacaggcatgagccaccgcgcctggctgagctgaacccttttaaggctgatcagagatgccgtctctgcagtcttcccctccaccccccccttgagacagagtcgcactctgttgcccaggctggagtgtgcagccacctctgcctcccaggttcaagcaattctcctgcctcagcctcccgagtagctgggattacaggcatctgccaccatgcctggctaattttggtatttttagtagagacgggtttcaccatgttggtaaggctggtctcaaactcctgacctcgtgatctgcctgccttggcctcccaaagtgctgggattacgggcgtgagccaccgctcccagccttcactgcagtcttaccagccctttccttctcaggtcactagttgattttccctttatgttcctgtagcgctttgccttcacctgtaatgatagcagctcccgtttgtggtgcgttttgtaagggctggacactctgccaggggtctgctatacaaactgtatcctcccagcagtcctagaggtaggtactactctctccatttcacaaaggaaaaaatggagattcaagaaaccccactgagatccttcagtggcagggcctaaggcttgaagcctcaaccttaacaccttcactgtgtctatcacaggagtttgcatttgtttctgtagttgtgtgttctttgtagtccactcctatccctcattttttctggcttggaaggacttagtatttgaactgggaggagagagcaagttgttttttactccattatccattgatgtctttttaaaagttgatccatatttgtcgtcttgtctccatgatgcgtgacagaggttctctgtatgtcttgttctagcttttgctctgcatgcctgcaggaatgtctgaagccgaagaagcctgtctgtggggtgtgtcgcagcgctctggcacctggcgtccgagccgtggagctcgagcggcagatcgagagcacagagacttcttgccatggctgccgtaagaatgtatgtggaagtgatgtggaagagtccatgtctttccatgataagttggggtaaaacgtacagctgccatgttgttgctgaagttagagcatgactaggtcactaacagcacgcgtgcatgccaattacctgtggtgatggctgggctggtttgttttcataaccttactggtttttgtttctttttttaagagttggttaagtatatattttaggtttgaaagccatagaaatcagttatcccagttttttcctataaaagatcaattatggccaggcgcggtggctcattcctgtaaccccagctctttgggagtccgaggcaagagcttgaggctaggagttaagagaccagcctggacaacatagtgagacctcatctttacaaaaaaataaaattagccgggtgtggtggtatgtacctgtaggcccagctactcaggaggcagaggccagaggatcacttgagcccaggagtttgggattacagtgatctatgatcatgccactgcactccagcctggctgacagcaagaccctgtctcttaaaaaaaagtcaatatgaaatcattggattgtaataacaatagctaacatttgaaatgcatccatgctcttgtataatcagagtcaagtatatttattttcatacctgttataactgctactggaaaggagaaatactgttgtcttattttccaagagatatacacagccttgttgattttagaatcattaaaatttttaaaattgcagaccatacaaaagtacacaataatgtaggcttgttcctcattccagagattacttcaaaattcgttcaacttaaggcctggcaaggtggttcatgcctgtaatcccaacactttgggaggccaaggtgggtggattgcttgagtccaggagttctagaccagcctggacaacatggtgaaacctcggctctactgaaaatacaaaaaactagcagggcatggtggtgtgtgcccgtagtctcaactgttcgggaggctgaggtgagaggatggcttgagcccaggaggcagaggttgcagtgagctgagttcgtgccactgcactccatcctgggtgatagagccggaccctgtctcaaggaaaaaaaaagtgatttaatttcgaaagctgcataacattttctgccctttgacaaacactgtagaatttttaccaaccaagttgtaggatttttgcaaaatgagattatactataatatatatatttcttcaacttttttcacttttttaaatgtacactcattcccaactttttttttccacttttcaggttttttttctcttacatattggacagccttgcatgtcagtttcattatttttaacacttcggtatggatgcccatagtaagaatataccttaccatctccttttcagcgtgatttagtattagggatgcatagtagggccatttcaatgctgaatagggctattttctgtgtcttaattgggggcttcactcttgaggctgggcatggtggctcatgcctatatcctatcatttggagaggccaaggcaagaggatcactgaccccaggagttcgaaatcagcctgggcaacatagtgggactctgtatataccaaaacaaaccaacaaacaaaaccagctgtgtgtagtggtgtatgcatgtagtcccagctccttgggaggctgaggtgggaagattgcttgagcccagaagtttgagagcagcctggggaatatagtggacccagtttctacaaaaaaaggaaaaaaaaattgaggattcctcagtttgtagcttaaagtcaagttcttgagctggaggtgagacaatcatcatggtaagctggagctcaaatattggagcatttttttccccctttgaagtttacttttagaaactcaaaatattgaaatacaattccctactgtcttctttttttttttttttttttttttttgagacggagtctcactctgttgcccaggctggagtacagtggcgtgatctcagctcactgcaggctccgcctgttgggttcacgccattctcctgcctcagcctcctgagtagctgggactacaggtgcccatcaccacgcccagctatatatatatacacacacacacacacacacacacatacatacacacagagatatatatatatatatatatatatatttgtatttttagtagagacagggtttcactgtgttagccaggatggtctcgatctcctgacctcgtgacccgcccgcctcagcctcccaaaatgctgggattataggcatgagccattgcacccggtctcttcatctttatttatgcatgcataatgtggtttttggttttgttttgttttttttctgagacagggtctggctttgttgcccgggctggagtgcaattgcgtggtctcagctcactgaaacctctgcctcccaggctcaaaccatcctcccacctcagcctctcaagtagctgggactacaggcatgtgtcaccacgcctgcctaatttttttgtattttcagtagagacgagttttgcatgttgcccatgctgatctcgaactcgggagcgtgaagtgatggcccacctcagcctccctcaggattacaggtgtgagccaccgtactccgcccatgatgggctttttgtttgttttactgtatgcttttgcttttctccattttcaagattagtgattgtactgttggcatgcctcagaaaatgtttttctttcctttatcttccctcttttcttcaattcttaaaactttctttctttttagaaaacctgtaatgaagcactattctctgggttttcttctctttctgttttactgttgcacagcctagattttatatgaaaggctgggccgggcgtggtagctcacgcctgtaaacccagcactttggcaggctgaggcaggcagatcacttgaggtcaggagttcgagaccagcctggctaacgtggtgaaactccatctctactaaaaatatgaaaattagctgggcctgatggcacacacctgtaatcccagctactcaggaggctgaggtgggagaatcacttgaacccgggaggcggaggttgcagtgagccgagatggtgccactgcacttcagtctgggcgacagagtgagtgagactctgtctcaaaaaaaaaaaaaaagagaatttagattttaaagattatttctcagaggctggtgatagatactttaaccagggttagtggcttttatatgttttacctaaaggatcacttttctctgctgcacataacagaatgtggtttttggcttgctgtaaggagactagtttaaatgctagtatagaaaacttttaaaaacatcctagatttggagcttgtctgtgagcagacagcctatcatgaataggagcaaacctctaggagagttattttagagtggaagtggatatcctgatttagtcgaataaaatagcagccttggtattaatgggaaatctgcaataatcagggtttcagccccatcagcgtagtcaggagtttggtgagattatttgccagggtggtgtaggtctagttttctttgtgcccttgtttgggactatattttgcctgttgcaaggtcctcactaacttatgggctctgattcttcctatttgagttcttcctgtccaagatccggtcccacgtggctacttgttccaaataccagaattacatcatggaaggtgtgaaggccaccattaaggatgcatctcttcagccaaggtaaatgactcagtctccccttaggtggaggtcatctcttgctattaatacaaagaggttgcatgcccaggggtttagttgtatgaattgttatgctggctaaagctgatacaagtattttgggaggagtatgcaagggaggactctggtgttcacttcagatgttagctgagctatattctttttttcttttttgagacagagtctcgctctgttgcccaggctggtgtgcagtggtgcaatctcagctcactgcaacctctgcctcccgggttcaagcgattctcctgcctcaacctcccaagtagctgggattacaggcacctgccaccatgcctggctaaattttgtattttttagtagagacagggtttgtcatgttggtcaggctggtcttgaactcctgatctcaggtgatccgcctgctttggcctcccaaagtgctgcgattacaggcgtaaaccaccacgcccggccagctgagctgttattttcacaacacttgacctgagtctgaagtgatcatcagcatccttatcattacacatttggtgagctttgctcctttttggagtgtactgtggttgaagtttaatggaaaggtactcacagaaaagttttcttttttcctgtgtttcaccttccaggaatgttccaaaccgttacacctttccttgtccttactgtcctgagaagaactttgatcaggaaggacttgtggaacactgcaaattattccatagcacggataccaaatctgtggtgagtaacctttttttttttttttaaacttcattaagggaaaggatcaagcttggagaaaaatgacgggattagtagaatgaactcctgtgtgcccttcacctagattgacagattgttaacattttaccatatttgcttaaccatgctctatagtacacattttttgctgaccacttgggaataagctacagataccatgaccatttttgcaccctgaatacttcgcaccctgatacaggagtgtgtatgtcttaagaacaagaatgttttcttggaaaattatatttttgtgtgtataattaatcatattcaagaaatttaacattgattcaatctaatgtctaatgtgaaattcatgttttaattttaacaattgtaatgtctttcatagcaatttccccctccccccaaggcagaggcagggatggtacacgagttctctgtcctctgggtgctacattaagtcatgtgatgtctgttgttggtaacattaacttggttcccttggtgtccaccaaatttctccatgaagctgccattttatttttggaagtagcttcttcatagttgtggggaaagaggatttaggtgaaattattaggaaaaggcttatcaatccttggacattttactcagatattacctactggcatgtgtagtctcctttaaaaaaaaaaaaatgtaggctgggcacggtggctcacacctgtaatcccagcactttgggaggccaaggcgggtggatcagttgaggtcaggagttcaagatcagcctggctaacatggtgaaaccccatctctactaaaaatacaaaaattagccaggcatggtggcgggcgcctttaatcccagctacttgggaggctgaggcatgagaattgcttgaacctgggaggcagaagttgcagtgaactgagatcctgccactgcactctagtctgggcagcagaacaaaactgcccccccccccccccccccccccaaaaaagtatttgttccatcttagcaatgtgttacctttctctctcaatgtgattgacagaccaggtctttttttatagttaggtgtatacttcctctatagttttaatttttccatttatctcatactgcttctcttgaactacatactctgttgtatgggcagccttcagctccattgctgtaaacagtggtgcagaaattttagaattttaatgagcttttgtgagagtactagggcagctatcaatgctcatcttaagatggaactggccattttgagaaacatatctttgcctgtatctatgtatgtttataagctaaagtcttagatacagattgacttggttaaatgttacttgcactcataattttgttggatactgttattgctgaacttttctggtatggcagcctaattttctgtctttttcccctcctttggcttctgaaatccctctgattatgttgtctatgttgaggccttctcttcagcctttggccctctgttctgtcttcctctccctctgcaagttttttttttttttttttttttttttttttttttttttttgaggcggagtttcgctctgtcgcccaggctggagtgcagtggcgcgatctcgactcactgcaagctccgcctcccgggttcacgccattctcctgcctcagcctcccgtgtagctgggactacaggtgcgcgccaccatgcccggctaatttttgtatttatggtagagacggggtttcaccgtgttagccaggatggtctcgatctcctgacctcgtgatccgcccgtctcggcctcccaaagtgctgggattacaggcgtgagccaccgcgcccggccctctgcaagttcttaactctgcgtttctcccttccctttagaagccatctccttttcagtctctagtcccaccctatgttctagctccccagctacagctgcctgcccaccttttccactcagtcttctaccattccagatttctctcttgtcaatcccctttatcactgtatcttccttgctgtggggtagggttccacctttaagtgggggcacttaggtcttctctctccctggcatgagttttctgcactcactggtctggttgtttacatgtgttgacagtaactgccgccttctggccttttctccgtgctgctgcctctcttctggagcacaatttttttttttttttttttaagacagagtctcactctgtcacccaggctggaggctggagtgcagtggcacaatcttggctcactgcaacctccacttccagggttcaagcgattctcatgcctcagcctctcaggtagctgggactacaggcgtgtgccaccatgcaaggctaatttttgtatttttagtagagaagatgtttcactatgttggccaggctggtctcaaactcctgacctcaggtgatctaccgctttggcctcccaaagtgctgggattacaagtgtgagccactgtgcccggcctggagcactctttcatgtcctctttgcctttccaaatacttcccaatcttcaaaaaccaaatcaaccttttgtgtgagggcttttcagcctgatccccctcttctgagcatttcctttgttaagatgcatgtaaggctgtgttttacttccctgggacattgctcatcggcttattttcttagttttcctcatgcttttggattgtcttgtgtgctggattggaaggccagtctaggccccccaccaggctgactcacttctctgcttacagtagggaatgagaaagggtggtatcatgatttgaactttacccagtcccacgtgtcatttgacttgagctggaaatttgcagtgtttttttgggctgctgatgtgcacaggaaggagttactggccctggacagtatgtcaggaaagctgtcctggaagaaaggaggccagacacaggccacagagggctggtgcaagcttggaaattgggtgcctaagaccttgcttttgtgttgaaaggtttgtccgatatgtgcctcgatgccctggggagaccccaactaccgcagcgccaacttcagagagcacatccagcgccggcaccggttttcttatgacacttttgtggtaagtctggagcctgggctctgatccctcccctgggggagtggcacggctacttcactcttctcaaaaggggaaatggggatccccagtgttgaactttgtcgctgttgtgatgggcttccagtctgtatactggatacagtgataaaggggattgacaagagagaaaagaagactgagtggaagaggcgggcaggcagctgtagctggggagctagatgggcttccagtctgtatactgtagctactatacagtttctattcatgggccaggcaggtggccagagtgacatttatttacttacatgagatggagtcttgctctgtcgcccaggctggaatgcagtggcgtgatctcagctcactgcagcctccacctcccgggttcaagtgattctcctgcctcagcctcctgagtagctgggactacaggcgcatgccaccatgccccattactttttgtactttcagtagagacaggctttcactatgttggccaggctggtctcgaactcctgacctcgtgatctgcccaccttggcctcccaaagtgttgggattacaggcgtgagccaccacgcccggcccagagtgacatttaagaagatgatctgggctgggcgcagtggctcacacctgtaatcccagcactttgggaggccgaggtgggcggatcctgaggtcgggggttcgagaccagcctagccaacatagtgaaatcccgtctttactaaaaatacaaaaaaattagccaggtgtggtggtgggcacctgtaatcctagctacttgggaggctgaggcaggagaatcgcttgaacctgggaggcaaggttgcagtgagccaatatcgtgccactgcactccagcctgggcaacagagcaagactgtctcaaaacaaacaagaagatgatctggtcagtctttgagacagagacagtgatacttgctctttccatctcctagccctgccaccaaatttttgtctacttttcttgtggtttatataatttctgcctgttatagaacttggtttggggacaggtgcggtgcagtggttcatacctacaatcctagcatttttgggaggctgaggcaggtggatcgcttgagctcaggagttcgagaccagcctgggcaacatgggaaaaccttgtctctgcaaaaaatacaaaaagtaaccaggtgtggtggctcctacctgtagtcctagctactttgagggagctgggacaggaggatctcttgagcccaagagacggaggttgcagcaagctgagatcatgccactgcactccagcctgggcaacagaatgagaccctgtctcaaaaaaaaaaaaaaaaaacaaaacacacacacacaacaacaatttggacttgggaggctcaatctcgcatgtccatggggaccataattgaaatgatcctcctgaggatttccaagccaggtggtgcctgactcgttatgctgccatcaccttgttttcctatggaaatgcaggcgcagcattgcctagcttctccaccccccatgcccaagcaggacaggaaaatttcacaggaggtttcacaggttttaattatcttcaaaaatacttcaggtcaaatagcatatatccactagccaaatacggctgtcaggtttatattctttccctagagctggatggtttcaaaggggcacactgttgtcttgccattatagtagtaggtaactttggccaactatatcaagtaaacctcttacttacatatatagatgtcaagttaggattttagagtggtattcggtcttgatggctgaatttcagtatctaagaaagaaagctctctgctaaattgtcataaagaatattttttctcagtctgacagtgtctgaaactcagacttcagaataactgccctttttgttaatgtgacacagatgaattacattcatctgtgtcacattaacaaaaatgactcattaaaaatgagtcctaaaaatgactcattaaagagggctagttgcgctatagtttctgctgtattgtatggctctaaaaatctgattctgtactgtgcactgattccacctctcagaaacaactcttcagctcagtgcatctgcgtgctctgttccgacagacttacaaatgttctgagcacttggtctgtgccagcctccattcgtgtgctgtctgggtttctcaatctccatttaagggaggcatccttaacttcatttaagaatcaggcagcagactgggtgcagtggctcatgcctgtaatctcagcactttgggaggccaaggcgggtggatcacgaggtcaagagattgagaccatcctggccaacatggtgaaaccctgtctctactaaaaacataaaaattagctgggcatggtggcgcacgcctgttagtcccagctactcgggaggctgaggcaggagaatcacttgaacctgggaggcagaggttgcagtgagccaagactgtgccactgcactccagcctggcaacagagcgagactccatcaaataaaaaaaaagagaaggcagcagagacagattaattttcccaaagttacatacctagcatcacaaacagttgcactggggatccggtccctggcaacctgctccggatccagttgctaggctgtcctgcttctactgaaagccagtctttgcatctagaaacagttgctgaggctgcatgtctctttttgcccttaggattatgatgttgatgaagaggacatgatgaatcaggtgttgcagcgctccatcatcgaccagtgagcagagtccgtgcttgctatctgtctcatgttacagagcttccattacatattaaacgtgaaatctatgactcctgtaccttacctgttcaacagacctgaaaatgagccatggcattgggacagggtcacttctgacaggggaagtgggtccccaggtcagcccttctcttccctttgggctcttgccaaagctgtcttcccctactgttaaccttgtttgtcacacggtcgagttcgtattggttctcggctacttcctggagcttctgccgcctcctgtggaagataatctagcttctccacctcttgtttcacactcattcctcccatccagtgtttgtctctcgggtccttcaagccagccaggaccttttctgggtcatgaatagcacaatgaagcaagtgtctcctttccttgtccccaaggtgtgcagactttggcagccgtgcacctgaccagagctgaagctcccgctgggctgtggggttgccagaagctggggttgccatcccggggtacatgtcaccagtcctcttggggttttgtaccatctgatgctggaagttttgattagtgatattttctactactacatatttagagttcactggttcagtcttaaatgcctgcatggtgcctttttaggataaggtataaccatacatttttggtggaagtgtttctgggttagggaagttaaagtctgtttatccgtaagtggggaggagggtcagctaagagaagtgggagggccagagctttttggttctgatttacaaattaatgaagtagtttcaaacaacgcggtcatgtttacctctccatttgggagcctgcctacattcttgttctagaagcacaaaaaatcctcagatgaattagaagaaagaggtttggggactcagcggatactagttcttttaccttctgcttggtaacttagattaaactgagcattgtttttctgtcacaaatgttttccttatgacactggtttcgacatgtaaaatgtgtttgaaaacctgctttgtagatgcagagagaagctataggaaacccagtaccacccctggtctgttctgacgagacatcgttcataaggcacagcacatcgcaagatgaacagttgttaataaaagctgttgctggaaacttgctttaggaacagctcaagaaccttggagttcatatttcacaaatattaataaatataagtccaagagctgtcagcctaatctgtaggagcagaacctctgattgaccaaaaggcatatgggtttaggttggttttttgatgtcatatgtctctgatggggctgcaagtgctacctcgcgcttgtacactgctgctgtggggctccgcgcctgccggtgaagagctgcagatgccgagaagccagcaaacacagggcccactggaaaaaaatagttttttcattagtatttctcgggaggacccaaaagttaaggtcagcttgttcactgtaatttctggaagaagttcactcagaccttcctgaattcagatcatctcagaagtctggagggaaatctggcgaaaccttcgtttgagggactgatgtgagtgtatgtccacctcactggtggcaccgagaaacttacttccttgtattaagtgcacttcttgtatttctaataagatgactttccagaaagtgagatttgttatgttctggcttttaaaaggtaaaatataaataaatttcataacttaatctaagtggtaagctatggttcttgttttcattcaacacatttgccatagcatgggcttggggagtctccagaagatggttaccctttctagaagggaagttcttgcttgttgctgagtcctgtttggcgtcaaatctcagctgatgccaccagctgggcctcatggtgcctgtcctctggaaaaagaacacttgttacagttgggaggctctgggaggtgagaagtggcagcgctccatatagcaaggctttagacatgcggcttctgctacgtgcgggtaacagcagcagtgctgagggcttgtagtaaaggggctccgcagggtcaagtttcaggtcctggatgtgtttaagttcatactctgctgttagctgtggggcatctagcgaatattttctgaacctgtctcctatgaagtggggataattttatctgcctcttaaggatgctaggatccaaggagcaaagtacacagagctctccctgcacagcgctgcatcgtgggtgctcactgtagtgtttggctgcttgagcttcattccaatcccatagaaacgttattttttaattttttttagtaagagatagggtctcactatgttgcccaggctgggcttgaacccctgggctcaggtggtccaccttggccttccaaagtgctgggattacaggtgtcagtccgagcctggcctggaacctatttgttttgttttgcttttttgagtcagggttccgctctttttgcccaggctggagtgcagtggcgcaatctcggctcactgcaacctctgcctcccaggttcaagtgattttcctgccccagcctcccgagtagctgggattacaggcgcccaccaccatacccggctaattttgtatttttagtagaggtggtgtttcatcatgttggtcaggctggtctcctgacctcacgtgatccgactgcctcggcctcccaaagtgctggttttacaggtatgagccactgcacccggccctggaacctcaaatttaatacagccgagacagttcagcatctccaatcttcacccatgccttcttttgtattattccatcttgcagtggtaactacccaagccagaaacctgggaggcctcttcctccctcacatccgtgcaggccacctctgtctaagtatcagctgagtcctggacgccagttacctcagaatattgcaatttgtgcctgtttctttgaggtctgacatcctctggaaatgaagtcccgtgtcacgccaaaacaggtcgagaaaatgacactggaactgagacctgaatgaaatggggagaagcccagtgaccatgttggggaagaggattccttgcagagggaaccaagttcagaggccttaaggtgggagcccatgggttacacttgaggccctgcagcaaggaggcggctggtaagcccatggtggagtgaatgagggagagaatgaggcagcacggggcagtctggaaggcagaccagaggggctgtgtacacatggtcaggccttgggcttttctcagtgagcattcttgggttctaagtgaggtgatccagcttagattcctaaaggatgcttctggctgtgtttggagaagggactgtagtagggaaacaggaagcagagaccagggaggcggctgcaggaatccaggcagctggtgatgggggcttggaactgtgtggtgatggtggtggtgggattttgaggtagtctgacgtggtcaggtatgttttctgtgtttttttgagacaaggtctcaccccgtcacccaggctggagtgcagtggcacaatcttggctcactgcaacctctgcctcctgggctcaagcagtcatctcacctcagtctcccgagtagctgggactacaggcgtagccaccacgcccaggtaatttttgtatttttggtagaaacgaggttttaccatgttgcctaggctggtctcgaacccctgggctcaagcgatcctcccgccttggcctctcaagtacctgggaggccgaggcaggagttcaagaccagcctgaccaacatggagaaaccccatctctactaaaaatacaaaattagccaggcgtggtggtgcatgcctgtaatcccagcgactctggaggctgaggcaggagaatcccttgaacccgggaggcggaggttgcggtgagccaagattgcgccattgcagtccagcctggacaacaagagtgaaactccatctctaaataaataaaggcattctaagttctgcatggctcaaactgaactcatccaccaccttcctaccaccccacactgtgtgcttggcttctctttcccggcagacgtaaccaccatccttctaattgctcaagaattaacccacacctcatctttaactccttgtccacctccatgccccatattaccaaatcaagttaattttatttatttttatttttttgagacagattcttgctctcttgcctcaagttaattttagctcttaaataacacatttgggccagatgtgggggcccacacctgtaatcccagcacttgggaggcctaggcgggcagatcacttgaggtcaggagttcgagaccagccttgccaacatgatgaaaccctgtctctactaaaaatacaaaaattagctgggcatggtaacgggtgcctgtagtcccagctactcagtaggctgaggcaggagaatcatacgaaccctggaggcaggggttgcaacgagccgcagttacgccgctgcactccagcctgggcgacagagtgagacaccgtctcaaaaaaataacaaaaaaataatgttggcaaagcctgagtcctgtcctctcgctctccccactggacagcatgaccttcaccactcgctccaccttctccactaactacccggtccctgggttctgtccaggcgcccagctatggcgcccggccggtcagcagtatggttagcgtctatgcaggtgcccggggctctggttcccggatctccgagtcccactccaccagcttctggggcggcatggggtccggggacctggccggggggatggctggggatctggcaggaatgggaggcatccagaacgagaaggagaccatgcaaagcctgaacgaccatctggcctcctacctggacagaatgaggagcctggagaccaagaactggaagccggagagcaaaatccgggagcacctggagaagaagggaccccaggtcagagactggagccatcacttcaaaaccatcgaggacctgagggctcagatcttcacaaatactgtggacaatgcctgcattgttctgcagatcaacaatgcctgtcttgctgctgatgactttacagtcaagtaggagacagagctggccatgcgccagtctgtggagagcgacatccatgggctctgcaaggtcactgatgacaccaatgtcacttggctgcagctggagacagagatcgaggctctctaggaggagctgctcttcatgaagaagaaccacaaagaggaagtaaaaggcctataagcccagattgccagctctgggttgactgtggaggtagatgcccccaaatctcaggacgtcagcaagatcatgacagacatgcaggcccaatatgacaagctggctcagaagaacagagaggagctggacatgtactgatctcagtagattgaggagaacactacagaagtcaccacgcagtccaccgaggttggaactgctgagatgactcacagaactgagacatgcagtccagtccttggagatcgacctggactccatgagaaatctgaaggccagcttggagaacagcctgagggaggtggaggcccgctatttcctgcagatggaacagctcagtgggatactgctgtacctggagtcagagctggcacagacccaggcagagggacagtgccaggcccaggagtaggaagccctgctgaacataaggtcaagctggaggctgagatcaccacctactgccgcctgctggaagacagcgaggacttcaatcttggtgatgccctggacagccgcaactccatgcaaaccatccaaaagaccaccacccgccagacagtggatggcaaagtggtgtctgagaccaacgacaccaaagttctgagacattaagccagcagaagcagggtaccctttgggaaacaggaggccaataaaaagttcagaggtaaaaaaacaaaacaaaacccacatttgtgttttcttatcatcccactggcacctacatttttttttttttttcgagatggagtcttgctctttcgcccaggccagactgcagtggcgctatctcagctcactgcaagctctgcctcccgggtccacgccattcttctgcctctgcctcccgagtagctgggactacaggcgcccgccaccacgcccggctaattttttgtatttttagtagagacggggtttcaccgtgttagccaagatggtcttgatctcctgacctcgtgatccgcccgcctcagcctcccaaagtgctgggattacaggcgtgagccaccgcgcccggccggcacctacatcttaaaagccactgtgatctcatctgaaatactgccacaactttccatttgacctctctccattgctgcccagccaacatccagtcctccgccaccaagcagccagaaggatcttccaaaaatccaaatgtgaccgaccatatcctttaaaacccttcagtggcttcagttaccctcaaagccccacacctcacagggtcctcaagaccctgtgacctctgccaactgcctacgtctccaacgtcggcttcttgtgaaaggtcagaatcaaaacgtagtcaccagtattaaacaaaacaaccctgacaccaagagcgaaactccgtctcaaaaaaacccccaaaaaaccctgacacagagtcagggaaggctatgcagtgaatgcttgcatgcctgataacaaaaaccatcacaaaagactctgcaaaaacacaaccttgcacaaaggccatcgcaatgcaactttttttttttttttttcgagacagtttcactcttattgcccaggctggagcacaatggcatgatcttggctcactgcaacctctgcctcccaggttcaagcgattatcctgccttagcctccctagtagctgagattacaggcgcgcagcaccatgcccgggtaatttttgtgtttttagttgagacagggtttcactatgttggccaggctggtcttgaactcctgacctcaggtgatcttcccgcctcagcctcctaaagtgctgggattacaggcatgagccactgcacccggcccagaatgcaactttatacaaaaaatacttctacaaggacatctgcccagcaactgcctgtacaacctcacgctgccttcacccttgttaatgatctttgtagccaaagataaattttcaaaaaaattatgtgcccagcgcagtggctcccgcctatcatcccaacattttgggaggcccgaggcaagaggatcgcttgaggccagtagttagagaccagcctggccaacatagtgagatctcgtctttgaaaaaaaaattatttttaattatgtaggctgggcacggtggctcatgcctatagtcccagcactttgggaggcagagatagaaggattacttgagcccaggagttcaggaccaaagccagactaacctcaaaaaaaaaaaaaaaattagctgggtgtggtggcacccgcctctggtcccagctattcaggaggctgaggcaggaggattgcttgagcccaggaggtcaaggctgcaataagccaagattgtaccactgcactccaacctggatgacacaacgggaccctatctcaaagataaaaaaaaataacaatttttaaaaagtaaccctcattttgtcctttaaacaactttgtctgttccatagcttggttgatacttgatcatcaaaaagaaccaacctttgtctatccaggtgtggtggcacgtgcctgcagtcccagctactcaggaggctgaggcgagaagatcacttgagcccaggagttcaaggcttcacggagctatgattgtgccaccgcactgcagcctgggcgacagggggaacttgtttcaaaaaacaaaacaaaagcttttgtcttcctttacctccctgaatatgcagtagtttgctatgacaaatgtattcccatggtaatgctctattcccgactaaatatctttttcttctagggagcctctctctgttatttaggttgacatatatggtgtcagaaatgggacctgaaaaagattagtactggaagaaatcggtgattcttggaactggtgtacagtattcactagagccctttgagcgcactgcttccatggctccccttttctgccctggtgagtcttctctcaggttgagcctccctctttttggtagaggcttttttgttttgttttgttttagagacagggtctcactctatcccctagactggaatataatggcacaatcatagctcactgcagccttgaactcctgggctcaagtgatcctcctgcctcagcctcccaagtagctgggactatagacgtgccaccacacccacctaatttttttttttttttttttttttgtagaagcagggacttgctatgttgcccaagctggtcttgaactcctggcctcaagtgatccgccctcctcaggctcccaaagtgctgggattacaggcgtgagccacatgcctggccaaaagtgtgcgctttttttttttttttttttttttgacggaatctcagtctttctcccaggctggagtgcagtggtgcagtctctgctcactgcaagctctgtctcccgggttcacgccattctcctgcctcagcctcccgagtaggtgggactacaggtgcccgccaccatgcctggctaatttttttgtatttttagtagagacggggtttcactgtgttagccaagatggtctcaatctcctgacctcgtgatccgcccacctcggcctcccaaagtgctggaattacaggcgtgagccaccacacctggccaaaaaatgtgttctttattgaaaataaaagaataattttgtttaatttggagattatgtaagttttttgaaaatatgggctggctgggcgcggtggctcacgcctgtaatcccagcactttgggaggctgaggcgggcagatcacctgaggtcaggagtttgagaccagcctggccagcatgatgaaaccccatctttactaaaaatacaaaaattagctgggcgtggtggcacgtgcctatagtcccagctacatggaaagctgaggcaggagaatcacttgaacctaggaggaggagcttgcagtgagccgagattgcgctaatgcactccagcctgggcgacagagcgagactctgtctcaaaaacagaaaagaaaaaaaaaagaaaatatggacttatgaaggaaatagaaacaagatagtaagaaaaccaataactgagagacagagatatgaaggaagttatggttatgaagatatattttttaaaaggaaagttgaaaagaataattttgtatgggaaagagtctctggtaaatttatgttctaaagtaaaatgattggtatttaatgaagaggaagtataagacagggcacagagtcaaagcacatcatcaatggtctgaataagtcatgatggtgttcatgaagggagaacttatgaaaggcattttgtgtgtcatcaagttggctataattagaagggaattatttctacgtctttctaaagatagattaaaaatacactgatagaaaactaaaaaattcatatcccctatgttaaaacaactaggttttcttttttcttttcttttttttttttgagacggagtctcgctccgtcgcccaggctggagtgcagtggcacgatctcagctcactgcaagctccacctcccaggttcacgccattctcctgcttcagcctcccgagtagctgggactacaggtgcccaccaccacgcccggctaattttttctattttttagtagagaccgggtttcactgtgttagccaggatggtctcaatctcctgacctcgtgatccgcctgcctcggcctcccaaagtgctgggattacaggcgtgagcccctgcccctggcccaggttttcttcttctttttttttttttttttctctgagacagagtctcgctctgtcacccaggctggggtgcagtgtcgcgatctcggctcactgcaacctccgcctcccaggttcaagcaattctccgtgtctcagcctcccgagtagcttggactacaggcacactgccacgcccacctaatttttgttattgttgttgttgagacagagtcttgctgtgtcgcccaggctagagtgcagttgcgtgatc

SEQ ID NO: 242 - DNA, 1340 bp, Homo sapiens
gggtacggctgcgagaagacgacagaagggtacggctgcgagaagacgacagaaggggtaggtccagaaaactaattattggcatcagtctgtgaaatagtccattatttgttgttaaaaatgcttcaaaaggttttcagtgtcagtctgagatgcctggtatataggagcctttgggaaatacctatttttcagtattccatgcatattggatatcaccatgaagcaagagacatgcattctataatcatgtagacactcagactcaggggaaaatacaagttatatcctgaaagcctttaaaactctatggtaggatcaaagattcaaatggtttcagagaggttttatttcaattaatttgttctagtgctttcaagagcaagtacatcaaaatgtagaaggtaaaatgtatgcaacactaatataaattattccaagtctttaaggagccaaagaaaaaaaagatttctcacagctttttgttctgttttgtatttcaattaggaacttgcagtattattttgaaaaccattctaaaataataggagttaggaaataaataaagttttgctagccctgctaagttcaggcttagaggcttatcgctaagtgtaaacttcaccagattccacgaaaagctggatagctttttttctgacttatgttgtggttgcacccctcacaaatggcagaacagtatgtaaagctggtaacacctcggtttcagtgcaccatgtgtttgctttgtgaaggtgaagaatatgttggtttagagaaagaaattggatgtaattttatgcaatttacttttaaagacaaacataactatttagcagagaatattttaataaatgcaaaacaacagctggactgctgtacatcaaggacagattaactggaaaacatatgttccttatgtgtgattgagagccattcagaaaagacttcctttgtgttcagcctatacttttccatatggtataccttgaaaaaaattagcacaccatggttatttttctaccttttataaaagacagagcctgtttactcatttagaagatagagaaaattggtctaaaattgaacatcctagattcacactcccaagtcacttaaggtgatttgatggtgaggaaaatgattgacaaagcccaacaatgatctcaggaattacattttccaacagaccaaaaaatgttttcatgtagcagcaatgcagatttggtgaatatttaatatatattttagtatgtatttcactttatgactgacaattaaaaaatattgtttggccaaacagtaaacacccttttgaaaccaaaaaaaaaaaaaaaaaa

SEQ ID NO: 243 - DNA, 151152 bp, Homo sapiens
gatcaccacatccaaacagttgatatagatgataactatagggcatcaaaaaaggggagacaatatgttatacacataataaattaaagccctagctaactttgcttctaattctcctagtttccaattggctgtacttgaaccaaaccacttctgagcataggtcattatattgtttttgtatgtttattcaagacatacattttaaacttgaggtaatgagttgtagatgcttcttttcagaatacttcaaaccagtatcactatttttaagttattttgtaaatttaatctgtgcttacggacaaaccatcctacttattttattcccttcatgcttcagatactctgacaatgtgatctggacttgaaatggtaggaatttccagctaaggaatgggagggagggtgattgaggaatttaccttttgctggaatttgaaggtccctgctttgatgtctgagagatagatcagaacgcaggaaagtataattttagtatgtgtcatatccttagatcgggctgctcatggacacggttcatcagccttaggagttctcacttcccttagggttccctctctgcatcaccccttccaccaccgtcatactgactctcttgatcttgtatgtgtgcttcctatattagagatctggaatatttgtgatctggaccttcttctgttaacctgataagttgagaatatgatcccagtaaaacattttatcccatagcagtatatgtatggatttcaattctttttaggtggctgcaaaattcgggttcagggggactggatcagagagcgccgctttgaaatccctgatgaggaacactgtttgaagttcctctcagctgtccttgctgctcagaaaggtaactaaagactcagcgattttctttcttctatttcaacgggagtggaattctgacatgctgatacagaggaaagtggccattggcaaaatacctcaccctttaagccctgatagctgatttttttttcttcaggagtgaacacagggataggttagggaaaaaatctgcccagctttaaggacactaggcaagttttcagaatattcagtgtcatggcaagcacagcttaccatagactataattctccttctgcccctagatgaccccagagctgccctcatttccttagtttcttccactgtatccaaaaatggtgctggcccctgcatataaggaatgttgaaagaatggcttttggctatagtaaattctactcagtgaaagacttcccagtttctgaccatgaaccttatctctctagctcagtcacagcttcttgttccagagcaaaaggactcatctagctggtaccagaaattagacactaaggacaaaccttctgttttttcaggtactaaaaagttcctggtttccttgttgctatggtcattgcagagtcagtagattttgtcaggccaaatatggtgatgtagattaaagctgatgtcagacacattctcctgcagagtagttttatcaagtccaggcccactgaccagtgttcactccttatccttcctgtagcatggtagctgttcaggagccagcttagcagggtggtagaaagtacaagctcgagagccagacagcctggatttgaatcccaagtcaagaacttactagttgtacaaccttcatcaagttactcaacaactctgaacttcccttttcctttctgtaatatgggaagatttttaatagtacttacttcttggagtttttgtgatgattaagtgagatcatgatatagtcccttactctcaaccaggcattgtgctcagtcttcaataaatgttagctattactagtctgttccaagttcttataaacttctattgttctagttagtatatcagtgcttcagggataggtatgcttcttcgaactccaatccaagtaatttctacccttatgatagttttctgtttagtaataccactgatcaaattgtgatcaaatcaaagccctgttaccctggatatgttggatgttagattttttccccgtttgactttggggtctgtgtctttcagggcttcttggatttgaagacaatttttcttctatgaatttggacaagaaaataaattcacaaaatcagcctactgggattcatcgggaacccccacctccacccttttcagtgaataaaatgtaagtcccatgtgaaaacatatttgccttgtaggagaattatagtttaaacaattttacttttgaatctctcatttatttgctaggcttccacgtgaaaaagaagcttctaacaaggagcagcccaaagtgaccaacaccatgcggaagctctttgtaccaaatacccaatctgggcagcgggagggtctcatcaaacatatcctggcaaagcgagagaaagaatatgtcaacattcagactttcaggttagtgtctcttttgcttcctgagtctaaaaagttagtatatataacagacagtggcctgttgatatttaagacattagcctaattaagaatcaaaatatgataaaaaggaatggttgcctgtttcaagctcctgtctctatgctggccaataacatgcatatcagaaataatgcagatgctacagtttcccttggattttctttttttgtgtgtgtgggtcagggtctctctttgtcacccaggctggagagcagatagatcatggcttactgtagcctcaacctctcagtcgtaagcaatcctcccacgccagccctgcaagtaggtggaactacaggtgcacaccaccacatccagctaatatttgtgttttttatagagactgggtttcaccaggttgcccaggctggtctcaaattcctgagctcaggcaatccacccgccttggcctcacaaagtgttaggattacaggcttgagccaccgtgcttggccttcccttggattttctaactactaataatgccatgtctactaatgtctctactgagtcctagagaaccaaatcaaggtcacatgtactagagaattttcccctagcacattccataagcaagcgtgtttatatatctggcctgttaagtttttttttttcagccaatattagaaaattaaagtccatcattaccactagctcttaacttacttactttggtaaataaagaaagtttcacccagtcctcttgattgggaggtctatcttgggttcttttatctgtattattttttatttcatcttttttctggacttgtgtgtgtatgctgcatgtgaggtaccatgtggcatgtatcgccaatgcatgaagcaacaccacatttctttgttattcatgagcagaatgtacccttctagtccaagattctagtcccatctgctatcctgtcatacctcatttattctaattcagtcataactatatccctatgctaaaacttgcagttcctcatatcccccactatgcttatatttgtgtgtaaacagttaagacagtcatgagttttcccttctgctttcccccttaatactatgtctgcctcatcagaatttcctacacagatgtccttgtaatccttcaggaagtgagttcctggagtcaactatagccccttatagaacatttatccatatttgactagcttacagcatgaagatacctctttcccatccataagctctcctatcaagtatgagtttggatggagcttaattgaaaggaaatgtggtatagcaattacctttgcattttttaaaaataaagacttggtttccttctgtagttttacttaatgtaaaatttagagaaaataagcccactgcctttgtgttctagatgcaaaagatctttcttacatatgtggcaaaacattttgaggaattatgttagcatattgtgaacatacctttgtatggaagcgaaaagaaagaacttctgttggtttatacttgatctttgttttcaaattatcttttcgtattatgtattagattttttgttggaacttggaatgtgaatggccagtctccagatagcgggttagaaccttggctgaactgtgatcccaatcctcctgatatctactgcattgggtaaagaacacttctggaatttccttttggctatatgtttggtgttcatttacatgatgttttgccttttttaaaaaagactgttggtaaaacctactgtagactatacacgagagttaacttgcgggtcaaatttgtgagaacagaaatgaacagatacctaaaatggtgtaaggaagcatctaattttcttgaaacccgtaggaatctatatattctgcatagaaactaagacttggggtcagttctaacagtgacagttcctaggatataagagcaaagctctgctgttatcctctgtgggaggtattttgatttattttttgcatagcttatgaatgtacttgtgggaattctttagaaaagaaagctacttgttcttactgataacctgggtgaacagagcagttctataaaatttatctctctcccatctttttttcatctaatgtttcaacatatgggacaggaggtagccagagataattatgggatatgtatagatctcatatcccttttttcctcagattccaagaactggacttgagcacagaagccttcttctactttgaatctgtgaaggaacaagaatggtccatggctgtagagagaggtttgcattccaaagccaagtataagaaagtaagccgcatttaattatctttttaagtgtatgactaaatagggctcaccgggagttattccattatctacaacttgttccaaaagaatagtttaattgaattcttctctgtgtgtaatactgggatagggcagattgatcattcatccttatttcctagaaaaaaaaatccctaagctttctgatactatattttcattgcttagatagcttttaggggaaaaaagaattttattatgcttatatcaatacttagtttgaaataattacatataagatttagattactcactgacatggtcagaattgaatgctttacagaaaagcaatatgaaacgtgggcgcatggtgcatgtgttgcaatcagagcaagaatagaagtggtgtggaatttgaacgagttctaaacttggttttaagttaagaggagagttgactttagcaagatgggccaatttgtttgtctttagaaggtatgtggtaaaggcatttagctaccagaagagttaattacagggctatcatactaaggtctctaaaagaagtaatgtgagtaatttttctctacatcttctaacagtttatataggtaataaaactcctggggatgttattcctctcatataggtccctgactaatgtatatctcagacatatttctagctgtagttcacaagttaaaaataagtaaaaaagattgctgtttggttgatttcaatttcttagaaaattagacatcagaaactaggaaggaaaggtggaaggaacaagctgggatagtggctttattatttgaacttttaatgctgcttactcctggtaggctaagaagtgattaaaagaatagatctagagctgaaagtactcattgtccctcccagcttttaactcttattggtcagtgccagattagagcctccccagagaatattagtttccacttgacggggtccactgagaaattagaggatatgaagtcagatttgggcactagtatatcatcttgatggaaaattagtcgtgggacattagaaatgtggcaaagattggtattaacattaaccttttgtaactccccggaactcataggttcaactggtgcgccttgttgggatgatgcttcttatatttgccagaaaggatcagtgtcgatacattcgtgatattgctacagaaacagttggaactggaatcatggggaaaatggtgagttactttggaaatgagcttgattattattcatgttcatgtaaagttcagttgcttgttctgtgtactaattgaataattactcttgctaacagggaaacaaaggtggggtagctgtgagatttgtatttcacaacaccaccttttgcattgtcaattcccatctggctgcacacgtggaggactttgagagaaggaatcaagattataaggacatttgtgcgagaatgagttttgtggtcccaaatcagaccctcccgcagttgaacatcatgaaacatgagtaagtggttaactcacctgtagcctttgagtagtggctacaggagtttggatagtgtagagattaaatgtgagatactgtagagctgtgaagagtgaaagattaccagtgagggattggggtcacaaaggagagggtttttgagtaataacagaatcattgaggcagagaaattagacttgatatcagaggaaaagatagttctattagtggggcacctagaataatgctggagggtctgtagttggagtcagtttttattgtttttatgataaaatagaaatattcattgcaaatgtaataaaagataaaattagaagttaaatttcctcatttcttattctctacctagccagtccctctctccaaaggaaaccattcttaacagttgggtgtgtagccttttagatctgtactgtccaatatgacaaccagtagccatatatggctgttaggtacctgaaagtgactggtccaaattaagatatgctgtatgcataagctatatattggattttaaagacttaggaagaagatgtacgatatcttgatttctaaaatattgatcacatgttgaaataatttggatatattgagtaaaatgaaatttattgatactcacttgttttttttctttttaaatgcagctactagaaaacttaaaattatattgtgaggtgcattataattctattaaatagcactattctagccttttgtctattcatatacaaacacacacataggtacttggtgtataagactgtattattctatttattgtggattcctttccaagccagtatatatagatctacattattctttttaatggctgtgcttattaaaaacaggggcagcagagagaggtcagtgaagaatgggatttaataagcatagaagcagagatgtgttgaggagtagatgtggtggtagaaaatgattagttttaaagaaattaatatacctaaaaccatgaaaaccctagaagaaaacctaggcattaccattcaggacataggcatgggcaaggacttcatgtctaaaacaccaaaagcaatggcaacaaaagccaaaattgacaaatgggatctaattcaactaaagagcttctgcacagcaaaagaaactaccatcagagtgaacaggcaacctacaaaatgggagaaaattttcgcaacctactcatctgacaaagggctaatatccagaatctacaatgaactcaaacaaatttacaagaaaaaaacaaccccatcaaaaagtgggcaaaggacatgaacagacacttctcaaaagaagacatttatgcagccaaaaaacacatgaaaaaatgctcaccatcactggccatcagagaaacgcaaatcaaaaccacaatgagataccatctcacaccagttagaatggcaatcattaaaaagtcaggagacaacaggtgctggagaggatgtggagaaataggaacacttttacactgttggtgggactgtaaactagttcaacccttgtggaagtcagtgtggcgattcctcagggatctagaactagaaataccatttgacccagccatcccattactgggtatatacccaaaggactataaatcatgctgctataaagacatatgcacacgtatgtttatcgcggcactattcacaatagcaaagacttggaaccaagccaaatgtccaacaatgatagactggattaagaaaatgtggcacatatacaccatggaatactatgcagccataaaaaatgatgagctcatgtcctttgtagggacatggatgaaattggaaatcatcattcacagtaaactatcgcaagaacaaaaaaccaaacactgcatgttctcactcataggtgggaattgaacaatgagaacacatggacacaggaaggggaacatcacactctggggactgttgtggggtggggggagcggggagggatagctttaggagatatacctaatgctaaatgacgagttaatgggtgcagcacaccagcatggcacatgtatacatatgtaactaacctgcacattgtgcacatgtaccctaaaacttataataataaaataaaatttaaaaaattaatatagagagtagagtcattggggaaagaggaggaaagagtagggatattcaactattttccataatgtctcaataattaggatcatgtagaattctatttcacagtggtaaagtgaaggccttaaaatgtatggtcatgaagttgccatgaaattccaaaaatttattttcccagattccataaatttcatgttgcatttgagattgtcagaatgacccattgggaacttgagctcactcaacaggagagtccattttgatgtgttaattgcattgtctccctttgtggggctctcagcacatctaagggcctgttgctgttattgggagctgaggatcccatggaatgccagtctccttcctgcctgtaacttgggcaatggtagaccaatcaggcttcactagagagccctggacctacttttcttagtgggtcctgcctcggagagctgtcactcagaccatgcagacttcagtggagaacctgcaggacttcaggactctgagaggcagaaaacgttcagattctcttcccctaaagacctggctagcagccaggcaaaattttgaagcttgtccagcaaataaactgcatgcttctcagtccattaactccttggcttctaaatcccatacgtaatatttcccagtttcattcttcatgtacagagtcctcttctcctacctattttgtaatccattgtctctctcaggtgttgatagtagttgccctcaaaggattagttacaactttaaaccccttgtgagatagtggtgagtgagcccttatcaataatctacccatttttcttctctccatccttctctgttttttttatgctaatcgctacttctgttcatacatttttttgatccttagggttgtcatttggttgggagatttgaattatagactttgcatgcctgatgccaatgaggtgaaaagtcttattaataagaaagaccttcagagactcttgaaattcgaccaggtaagtaaagtttcattttataggaactttcctagatgggagatgagattgttagagttatgggaggtatatcttactctagggagtgatggaaacgtcttactgtcttgtgaaaacagtgtgactagtgatgcattgactacatacaagatttgtagtacttttattaagtgcttggatgggaggagggaagataacattagtgataaaaagtaaatacaacatttattcaaaacgtctttatcattaagagatttcagagatttgtctaaatgagttggtgaatgggtggggttaattggggaacacttcctggaggaagtgggccttcagctatgttgatgtggtttggcagatggaacagtgaaaactgttctatgattacttggcaagctgaggaacagcttggaggtaaaagagggaggccctgtgaggggaactgggaagtacagaaaagaagtttgtctgggatcaacagcataggctatgggctcatgggaactagatgataagttgaagctagctggtatttaaaacctgcaggaaaagcattgagttggtaacatttacataaaacctgatattcaagaacctggtttccatatatttgaagcagtaaatttgcctcagaacctggcatgtgacttgaatttttacttcaacatatggatactggctgctaaaagtgaatgcttcttattgagggaggaaaatgttttgacttcattcgaataatctttaaatcgttatgagagccttttcaaccttcagacgtagccaacattcaggtgatttgcagcagaatggtttttgtagtgagccattcttgtctatgtctaccttcacgttgtggttggctgacaaatttctttgctttttctttattctgcctccaaaaggggtacatttaggataaattctgagtcttatataactctggtaaaatatttcagtgaggatctttcaaaacaatttgaaactattcgctgaatttggtttgcagaattattcattcaacatttgtgtgctttttctttaaattaaaattgtgctgggtggtttctgcccagctccaaggaacttacaattattcagatttcatttttccattttaccctctgccactattagcaataaaagaatagtgatgtgctaataacaagcatcctatctgagggtgagtttagatgctgtgggaatgctgagatttaattcataaggtatagaaatttcatttatgtactctcactacagttgtaaaggttgtggaactagatactttgaaataggaacagtggcttatcaacctgattatctcttatattaagatagtgttatcctgcttatttgatgcttctttctatctgtagctaaatattcagcgcacacagaaaaaagcttttgttgacttcaatgaaggggaaatcaagttcatccccacttataagtatgactctaaaacagaccggtgggattccaggtaaagtaataagaaccttctcacagagaaggttaaggcttgatcttatttctgaccctccatattggtaaggggctaggaattttttaggccatgccataagcagatatataaacctaatggctcagtgcctcagtgctattatagaacaataagagtgtttcatttatctatactcaaaggtgagcctatcttagggaagttattacttatatgtcaagattgttgaagttttatgggctacctacagtgccttatttctctcacctcagcaaacttgcttaaatttttgccttcctgattttgcctttgtttcttacctattacctgttctggctattttttttcccaaactacccagctatttaattcaggataccagaaggcaaaaacgaagccatgaagggttcttctagcaccagtagctctcaatccttaaaagactttagaatcccttagagaacttcaaaaaatactgatgcttggacctaatatctgccacagctggagaacactgagaaccactgtttagtagacccttttttttttttttttttttttgagacggagtctcgctctgtcgcccaggccggactgcggactgcagtggcgcaatctcggcgcactgcaagctccgcttcccgggttcacgccattctcctgcctcagcctcccgagtagctgggactacaggcgcccgccaccacgcccggctaattttttgtattttttttagtagagacggggtttcaccttgttagccaggatggtctcgatctcctgacctcatgatccacccgcctcggcctcccaaagtgctgggattacaggcgtgagccaccgcgcccggccagtagacccttttgatttcctaatcatcctagtaaagtgcccccagtaagttcttagtgagtatttgtcctctacctactatctctttcttttcttttcctttccttttttctttttcttttcttctttttctttctgtttctcctagctggctgagcacagaaacttgaaagagaaagaatccccacgcatgttcagctgttttgaactctgagagtactggcatgggtggggagtcgatattcctatgctcctaggtaactggccagcaaatgaagtgacactgttagatcttgtacactttgccatgtttgtttcactcacctgactttagagtcagctgcagagctactgatgagaaatatctgtgtcaccttctggatcagggtacaaggtgttgcttcttttaatagaatgatgaataggttctttttccctacccttggtattctgtggactgacatttgctcagacttgcatggtttgattttatttcgtctctattagaagaagctagacttgtccataaatgtctggtttaaaggagaaatcaatactgttattcctctccaaaaattaagcccagtctaggaagagaagattggagttttagacttgattagttatctatctgttgtgaagtgttgttgatgctcatagagtaaaggaaaaggaagtgttcaaaatataatccaaatcttctgaggatattttaagaacgtgctattttctcctgtggtgacattgttgaagatgtactcccaatcttaacagaaccattcattcattagataactattcgttgagcacctactttgcaccagataccatgctaggttctaggagttcagtggcaaacaagcaaatacagtcccttcacagagcttgcaaaatagtagggaggatgacaggggttgttagggaaggagaagtacacggttctttgggagcatgtaacaagagagcctaaccctgatctaaaccagtgtggtaggtattatgttcttgtgtgatatgttctctttataactcgtttctttacttacagtgggaaatgccgggttccagcctggtgtgaccgaattctttggagaggaacaaatgttaatcagcttaattatcggagtcacatggaactgaaaaccagcgaccacaagcctgttagcgccctcttccatattggggtaaacacttgtttgtacattcatttatttgtgtgttaagtatcaattactagaggattatttagactcagaacagatcagtaattcagcaagccataaatgttccataaccaaataaccatttgcagcattgagaggttagtgcccccaaccctcccaaatgctgtccgtatagctcttaatgctccaggccttttagtgacacagatgtttctcatgctacatagtggttaggtggtaacttgagcttcctaaagtaggtatgcataatgaagagttaaaagctaagttttatcagatagtaaagaagggaaacaccaggagggagattctgggtggaagggtagagacagcaggagcaaaggcacagactgatcagaatacagccaactctgtatattgtcttaagggatatagtgtcatccctacacttattttttctttttttttttttttttttttgagacggagtcttgccctatcctccgggctggagtgcagtggtgtgatcttggctcactgcaacctcctcttcccgggttcaagcgatgcccctgcctcagcctcccagagtgctgggattacaggcgtgagccaccgtgcccagcgaatttttttttaactctgttctatcctgggctgcattaatggccagttatttaattttctgtctgtattgtgagtaaagtttttttcccattgtatttttaaactgtgtgttattggtatgtaggtcatatcttgtaatcatgctgatttaatttgttacagccagtacatttaggttatttcttgtggatttttcagatctacagccctataatctgtcagaatgtatatagtgcagtgcttagtagaatggactttgtagtagacttctgggatttgcatccgagttcaaccactttctaactgtgtaaccatggacaatttatgtaacatatttatgcctcagtttcctcctctattaagcgtgggtaatattggtacatactcatgaagattaatgagttcggacatgtgaagagcataatgggataggtttctttcctctgtgtgtgtgttgatttagggggcttctgagatagatatcaccaacctgttttatcctgctcctgttttaaggaagaaagactttggggcttttcatttaagatcagaattatttattggtcttagaatagattttaaattttatcaagacaatcatgactttacttttgtccattttgaaattttaaaataataatcattaataatagtaactgttcctcagatagcagctagtggctgtgtggcagggactatgtgaggcaatttgcacacatctcatttactcctcacaacaacgctttgagttaaatacagttgatccttcaacaacatgggtttgaactacacagatccacttatatccagatattttcaaccaaatgcagatggaaaatacagtattcacaggatgtgaaacccacgtataaggagggccaactgtgggacttgagtatgcgtgaatttgattatacacaggccatgccagaatcaatcccccacagatctcaagggacaactgtatttcccatttaacagatgagcagatggagaacagcaagttgaaataacttatttaagagcattcaactaggaggagagctgagattccaatcttaagttggcttaactcccaactctgtgctctttctactaccccacaatacctctataattctatagaacttgatgaaatatacctttagataacttcttttagcccatctaatttctagtttgtacttgcaggctgcccctttttcttcatttgaattctcttaatccattttgagagggtatctttcctcaaacactaacctctttggttagatcaggtatgcctggcttttttgtttacatttcttttcaaaaccttcagatttttttgtttgtttttgttttttgttttttggtttttttttttttttttttgagacagagtctcgctctgtcacccaggttggagtgcagtggcacgatcttggctcactgcaagctccgcctcctgggttcacgccattctcttgcctcagcctcccgcccagctaattttttgtatttttagtagagacggggtttcaccatgttagccaggatgatctcgatctcctgaccttgtggtccacccgcctcagcctcccaaagtgctgagattacaggcatgagccaccgctcgcagccaaccttgggatgtttttaatactccatacacattaatgcagagcttctagtgggatatttacattttttttcaggcttcctgtgtatttatgtatatctttaataaagatatgccttttgagtttttaatgatttttaaattatacagcaatgacaagtgcttttaaaaaaattaaaaggaaatttaagcagaattgacagataaggcagaagttcttcaatccctgttctgtctcctactcccaactttgcctaaacccccattccccagccaggccactacccttaggagtttatatctttctagaccagtgctgtccaatagagctttctgtgatgatggaaatgtcctgtatctgtgctgtccagtccagtggcttctagcagcagggggctattgagtacttgaagtgtggctagtgcaactgagaactgaacttctaatttaatttaatttaaagtaatttaaattcaaattccctatgtggctagtcactattgtactggacagtgcagttctagacctttgtatatgcttttttgttcactcatagacaaaatactgatttgtgtgtgtctctatatcataaacggtcttatatgtatgtgttggtctgcaacttgatttttttttttaactcagcagtgtgtcttggagaacctcccatcttattacataaagacctagctcattgtactttttttcaaattcctaattttgtcagtaatttcctttactaaaatggatgtgtcaggttgtgaaattctttggggttccccccctcctcattatctttgatttgccattaagtgctgtgatcatgataacccgctgagaaaaagtttgattttattgagtaatcaccccatgttttggattcttgggcatgctatgattagaggctttaaaaaccacactatattttcaccaccattggcaccaatgactgttaacaaaggagccaagtgcaccgtggccaattaatttcagaagactttctgtgggctggctgagatagagctaggatagggttccaaccctgcacttggtactgtgatctgttgcattggttctcagacttcagtggatgtaagaattgcttagagagctttaaaaaaagtgtggatgcatgtgtcctcacccctagaggctgtgattagtagacccaggcagctgtgcttttaagacatactcaagttgattctgtcacatatctagtatattggaaagagtcttaaactagtccagatgtcacctttggtattcactgtagcagtgagcaagtttgttgattgttttgtatcttaatgttctcaactatcggaacaaaaatattccttgctttggtagccttccaggttgtgaaaataaaaagacatgtgcaaaatacttttggaaattaaaagttgcaaagttttgtaaaagtataaaattcatcttaaactaatgctatactatggaccctggtgatggtaaagtgattgtttgatcctcggttctctaagagttacagttcaaatatgtgaaaaacttccccagtctgagatacttgactcagctttgatgttcttattttcaacattttaaaaaatttttatttcacttcaagttgtgggatacaagtgcagaacgtataggcttgttacataggtatgtgtgccatgttggtttgctgcacctatcaacccatcatctaggttttaagccccacgtgcattagctatttaaccttaatgctctccttcccctcgccccactaccccgagtggcctggtgtgtgttgttcccctccctgtgtccatgtgttctcattcttcaactcccacctataagtgagaatatgcggtgcttggttttctgttcctgtgttagtttgctaaggatgatggcttccagcttcatccatgtccctgcaaaggacatgactttttttattttttgaggtggagtcttgctctgttgcccaggctggagtgcagtggtgcaatcttggctcacttcaacctccgcctcccgggctcaagggattctcctgcctcagcctcccaagtgactgggattacaggcacccaccaccatgcctggctaattttttttttgtacttttagtagagacagagtttcaccgtgttggctggggtggtttcgaactcctgacctctagtgatcctcctgcctcggcctcccgcagtgctaggattacaggtgtgagccactgtgcccagcctgatctcattcctttttatggctgtatagtattccatggtgtatatttaccacattttctttatcaagtcttattattaatgggcatttgggttggttccatgtctttgctattgtaagtagtgctgcagtaaacatatgtgtgcatgtgtctttatagtagaatgatttatattcttttgggtatatacccagtaatgggattgctgggtcaaatggtatttctggttctagatccttgaggaatcgccacactgtcttgcacaatggttgaactaatttacactcctaccaacagtgtaaaagcgttcctacttctccacagcctcaccagcatctgtttccacatctttttagaacctttgctgcatgtatcaattttttttgacatgaatttttgtgaaatttcctagtctaaaaaagaaaccgatatctcaagttaaaatctgttagttatgttaattttggcattggtttgtatgaagttttaatatttaaaaaaacacagctatatcaggaagctgaaagtgctgtgtcaggtggaaaatttttttatcagtggagatgtgtttatacgttgtcatggttttactctagtctaggacattttgtttcagccattttctaaaatggctgtaggttccatttattaatatatctctgctattatgtaatctgagcagtgatattatacttcttggtattgtacatagaatctaatagagttaaaagctttttaataatatttgctgccacctcaccaagttatgattgttagaaacagtaattgctgtgttttgacactgtcattttgtacagtgcaagcaatcatttttaccacaattatcacattttttccactaccaaataacttaacaatgaagcaagaaaatattcttcccaaatatttattattaccaagcttcttaacgtaggggtttaacttttacaggacgttagccaattaatcttacctttaccttaaagcgtgtgcttctataatgctttgttcaatttatgtttgctttagtgaccttaaaaattgttagagactcttggaggtataaaagttgagaacacataaaactaaagcaaggatctgttttctttcaggtgcaagctgtggatgaagcaagatatagagagtgtttgaggatgttgtttgcaccacagtttattttaaatagttactgtaatgaccagttttaaattgttagataatctccaagggagatgagctagaaggatataagactgaaaagaggatacattttctttcaggtgaaggttgtggatgaacgaaggtaccggaaagtctttgaagatagtgtacgcatcatggacagaatggaaaatgacttccttccttccttagaactcagcaggagggaggtgagcaaaaatacatgatctccctgtctactgctcactgtggttagcacagaagaaactgctacttagaaaaggctacatagcaacgtggttaagcccatgtcgctggagtcagactgcctccattccagttgtagcacggctgtttagtagatgtatgacctcaggcaagtatcttacccgctcagagccgcagtttcctttcctggattaaggggtagttgtaaggattacatgagttaatacatgcaaagctctcagaacagcacccggcacatagtaagccctccgctgttagatgctcttatttaatatttcagagttgctagttaatttatatctcagaaaccaggacttggtcacaggatgaatactctgaaccaaggttgggttaccctcttaggatcctaggaatgatcagagtagcctggagaagtagcaagagccacctaactccttctctgctggtgtgagtataataatacatgcaagtggatgttgtgaagttggttcagttggtgaatgtctatggcatttgcacacctgcttaacaattaccttactcctcatatcctctatggaataatccaactgacttacttcccctactagtgatgcatgtttgtgtctgtctgttattccccagtttgtgtttgaaaatgtgaagtttcggcaactacaaaaggagaagttccagatcagcaacaatggacaggttccctgccatttttctttcatccctaaacttaatgacagccagtactgcaagccatggcttcgggctgaaccttttgagggctacttggagccaagtgagttttccctttaccattgtctctgctggtgatgtcatgactcccatccccttggtttaactttctgttttctaaccacatgtctcttacctttactgtcatattggtgatacctctggtgtgtgtcctgtctcttccccctcattgcttaatgatttttttagaggacacttttctgttggttcttatactcttttttgctttcccactggaggttttcctattaccatgtatcatctcttacatttcagatgagacagtggacatttctcttgatgtgtatgtcagcaaagactctgtaaccatcctgaactcgggagaagataagattgaagatattctcgtccttcacctggatcgaggcaaagattacttcttgactatcagtggaaattacctcccaagttgttttggcacatccttagaggctctgtgccgtatgaaaagaccaatccgagaagttcctgttaccaaactcatagacttggtaagaactgtcccaagacataaacctcttttacatttaattttcacaatacttaagtgacgtcctcattatctttgtgctttctgtcttcttttggccacgggggatgtcaaatgataaagaagaatgttactttagcactgttttgattagattaagcctaaggggaaagaggggggactaatctgcagttggctcttgttgtgagtacaatacataatactaagctcaccaaataagattaaagactcccctctcaaagatataatgcttgtttgttaagctcttcatactctcaagtcacttttgtataaattagcatgtacgtgaggtatgctaagtggggcaggcagaattatcctcatttgagcatatgagaaaactgaggcacagagacattgacgtgcccagagtcaaataccatcagttagtaacaaatctagcacccagatttcctggctcccagtttagtattcctcactaataccacattatatctaatcagagtaaaactttgctatttatggaagcatagaactatcctggaaccctggagtacctgaatcagaatccctgggggtgcttattacaggtaccctcacttctggcaatggaatcagaatctcaggatatggagcctacagatctgcattttatccgcattccagatgcttataatgtacattgaaatttgatacttacttaatgtgatgtgcttaagaaagaaaaggaggttgattttcccacctctccctcaagccaagctataatattaatgtttttatgaaggaagtacttactatcttcagtaacataagttgatttagtaataaagttcattgtattaagaaatttccttctaaatgaaaatattgttggattgtatgcagaatctctttgggctacaaaagtatattcttggtttttttaccaaagaaaattaggtgaggtgacagcatacgttatccttaccattagtattcacatggatcctttaggcctagccagagcgagtgattgtatctagcagggaggtctagaccagcaggcaggctgctggcttgtctgagtccgatctgttctgttgccatggaattgttttagctgtgactcagatagcagattaaaacactgagtccagccccggcattctttcttggaattatacttatttccccagagccctcatgactgagtatattacctctgtttgagagagaaccattttcttcagaaattcatatcctaccgttctgctgtttttcatgataattgtttttctcctaacattatatttctgtcttttagattttagtatttcaccttttagaatacattttggatgatgaagttgtttttcttatttctcctaccccctttccttcatctcagacattatttcccagctttctttgtttcagctttttattatgaaaaatgtcaaatgtgcagaaaaatggaaagaacagtacaacacacccccacatgccttctgtacatatatacacacagatgttttttgctgtgtcatgtaaaatttagtggtaatatgtcacttcaccactgaacacttcagcctgcatctcttaacaaaaagggcacacttaagcacaataccattattatgtataagaaaactaacagtaatccatagtatcatttaacattcggtccatattcagatttcttcagttgtcccaagaatttctgttatacctttttttaaaccaaaatccaatctgggttcatatagtatttggtgaggtctctgaagtctctattggagtagtacagttcctactttctttagtgacattgacttttttaagagtccagtacaaatgtccagtcaagggtcaaccatttcctaaatttttctggttgtttccttcttgttttttttttttttaaacttatcccatttatactctctccttccaccttcatgtaaacaggaacctacccttatttttagtcagagtcagtgaagatattagaatatctttgccattaatatgaaaaactgcaaagccattaatatgaaaaactttgcagtttttcatattctgggattggccagaagaggctcaaccctcataaagtttttattttatgtaaagtatactatcaggtaattttaccatgtttgcccatgaacagaaaggaaccaaaatcattagaggaatgaatggctctttgggaagcctttttccttctttttgtgcacaagtgattgagggttaaaataatagaaccctgatcatttttaattacagaatttctgagtttttattaaattgtatgtgtgtggacatcatttttcttttaaagcttttattttgtaggatttagggttcttttcacagtctgttgcatttcagtgttattaaattcctgtatctcattgatgaggaaattatctatacaggttgattatccattatccaaaatgcttgggaccaaaagtgtttcagatttcaatctttttcagattttcaaatatatgcattatatacttaccagttcagcttccctaatctggaaatcggaaatctgaaatgcttcaatgagcatttcctttgatcatcatgacagtactcaaaaagtttcgagttttggagcattttggatttctggattgggaatactcaacctgcattactgtggagcagtaaacaagaaatctaaaaacaattagtatcccatctttaataccttctcactctgttgtgacttgattttgaccttctgaaatgattcctcaggtatagtattcatgttttttttccccaagacccaatatcgtatttcaaatctcatgagatgatgctgttaataatggtacctgccctctgttgtattatttgctctaaaattttggtaaagccagaaacgagttcaatgtatgtgttgtctctctatgtactgttttagaaagatccttatgcactgttttagaaagatccttatgccacaccatcttcccaccaaatgcagaatgaaataactgacataattatttttcatccttccagcccttttcataatagtgactttgccactcctagaatagttgagattagcacaagtgggaaacggatgaaaatctaccatttgtaatcatctttattgtttttcagaattaagatagatttttctgttatattaactagaatattaagtagcaaataatcctcaatattgattcattacacactggatacaaagtattatggagtttatgtgagttcccataatttagtggtgatgaaagtatatttgcacataaaatatggctaaactttaagtcatggttaatagggagtttggttaaagataatctgaacattaaccacctttactggctaatgtctggtgtgcttggtaagtcagtattttggaaagtcgtttaaagtgactgctatgaaggttgtagtttgtattaacaataggttcctttcctatgttgtttattcaagcccttatatgctataaaagcttattgactgaccagctaatccctatagaaatcagaatcagcctgttttcattttaatgaatatttgatacatgtaacattaacatgactgagaaataagtttagcacataagaataaagtgaactaggaaggtgatttggagttagttatagaagtattttcagtcaagtccaagtacttaagaaacacttattaatatagtgggtgagcaggctcttccaggcttagaggacatcttgaataaagggtagaaggtgaaagtgaaaagaccatgtatgaaaaactgtaagatttccctgggacaagtgaagatcaaggataagaatgtatgaagctggttagggagaatggggcaggtggtagagagtcttgaagtcaatagataagtttatgcatgagccagagggtatctagaaccatcagaagggtttgctgattagtatgaggttgcaaattgatatagttggaagaacattctggtgttacttgtagaatggactaattgaaaggagacaagacttgaacttgccagatgtggctaagttgtaaatacggagatgaaaaaagttgagggatgggtagagaaactatatttgcttggggacatatctgttgggagaacaatatcaaaagtttgaaataacaggaataacttgttaatttgtccgtagtgtttttttcactatgtttttactttgtcttactaatctaaccatccatttcttactctgttaagtatatggcttgtatttcttctctatttcatatgaactaatcctttttagaacttcattttccattcagttttcggctatttatttatttatttttgagatggagtcttaccctgtcggccaggctgtagtgcagtggcacaatcttggctcactgcaacctccatctcccagttcaagtgactctcctgcctcagcctcccgagtaactgggactacaggcgcgcgccaccacgcctggctaatttttgcctttttagtagagatggggttttactgtgttggccaggctggtcttgaacacctgacctcaggtgatccacccgcctcagcttcccaaggtgctgggattacaggcgtgagccaccgtgcccggctatgctttttatttttaaatttgcatcttccacctctaattgactcttttattttagctgcatttaccacggggaacagtcttctgagggtgaatgttggggtaaagaatgatttgcattgcatttgctatgtgccagtgttgtcccactggggaaatcctgaactaagttctctttttaaatgtaatccatatatagccttttgcagagaatgggcatctctgctctttaaaattggttgaactaagtgattcatagtagaaaccttaggattattataggagtaagctgtttactaataaaggttaagtgatgcttctgttttcaaaattgagaccaaggttgaattcaatgtaatttctatgttgtttctttgtgcctgtacctagagaagtaaatctcttgtccctccatcagtatttaatcaaagtccttttgattcttctttcagaattttctcttgtattcattcatttgtaagtgtatgtatataccttttattatatatatatatcctttaatatatatacttagaaattatatatatatatatacacacacctgtgtgtgtgtgtgtgtgtgtgtgtgtataaaattttccattattaagatgtttaccttcttctgcttgacctacctcggtagcctttgaatgatccctttgtctttctctctctctctctctctctctctctctctctctgtctctgtctctgcccttcattttttcctattcagggctgtcagattgatctttctgtactactgctttggggcctatcacttccttgcttaaaggtagtcagtggcttccccatgcctgctgaatacaatccaaatgccttaatctgtcatgcaaggtcctcctaagtctgacttcaacataccttttcagatttatttcacactatttttcttggcattctccatgccccccacaaacagatgactaacttcttcctaatatcaatttgtgatttactgtctctgtgccttttgtttatttctgcctcttccacttgtaatattctctccccatctctaccctttaaaattctgtgagtcttttaaagggctagcaatgatttattgagaactcgtattcatgaattataacaataccagtctgtaaactctggaactcctcaccccaactcagttgcaaatcagagtcagggacaaaccaggtctttctcctttatcctcatttctcattgccttcccctgcaaaggcattttagcacaatgccttgtactggaggatggctgctgcttaaagaaaacttttttgagagcctggttcgacaggttagtatacaaaatctctgtctagttttattcatatcatgtattagatattcatgggaggaaaaatataaaatgtgtcagatagattcttcatttgataacaagtcctaaattttacaagaggttctagtctaaaattgtatcagatgttgggcactcaaaatcaacttgacattaaaaggtatcgtaattatagtactataaatatgtaccttataaagactattctaattgctttatttcatgtgatatttaagagtctagataaacccacaaaagcatgtttaattcgtgaagtatctaccaatattaaaacgcctaatccccatggataacagtagtgtgggaggaatgcattcagtattaccactaggaatgccagggagcacatacttttcctcctccctctccactcccagctcctgtgcatctcagacagtaagattgggatttctccttttacctagcagaactaagacatgtaatttagacttgagtgcttagtggtccatagtcagattcgaaacaatccaggttgggagtcactggggaggtatgaggaactttgaggaacccagaccttctgctggcatactgccccatcacccattggttttaggctgcttcaaggtaaatattactatccctattttagagatgaagaaactgaggctctatgaagtttggtaacttgtgtgagggctatacaaaattgccaagaggtggaacgaagatttgtacccaagcctgtccaacaccagtgcctatactctttccattaaccacgctgtcttttaagtggggtttctcactgtccttagcctgttatggagaatacattctcacagttttcctctacctctctgtccaggaagcagtcacattgtcctttttgaattgtctaacggaacatagtgataatgactgtggagttggtcagacctgggatccaatcctgattcagccacttactacctaatagtgagtgtggccttgggcaaataatttaagctttcagagcctcagtttcttcatctgtaaaatgggaataatatctactttgcacatgtgtacagattaaatgactgtatataagcactttgcacagttcctgatacatgacagatgctccctaagtggtggtggtagttatcatggctgctattattattggattgtaataacagcataaaagataggaagattaaaaagataccttcttacctatcccctgcctctctttttttctcttatgcccaataggaaaataaaaatgggataatgatggatcttctgatccgcaaaggtctgaaatgaaattcatttatagttcagaaggaccttcaaatctgggcactctgggggcctttgaggaggggattgggtacgaggagatagaaaggaatctgggatgctgcttaggagactggctggggtgagaagaatgaaaatggaaagtagagtggtttaccatctccttccagatggccactgttgggcccacagccatattctttcattgaggtatatacctcaatgcacctgcctccaagcagcagacaggaagagacatcaggggcatttggctgggtcagttggcagatgccaaagggcactgaagtctagaactgcacatatttcttgagtgatattctcaaactgcacaaaaatttaaaatgtatagtaaactttgtgtatgaaaaatgtatttcattttcaacaatcataatttatttgaagaattcaaagctgtttaaagcatgtatatctggtaagatagtgagttctaatactgatctgtttctaattctgtaaattaattctaatcatattctgtctgtcaatgactttcttttcctgctccgctctcaggaagaagacagcttcctagaaaaggtaatgcaatccattggtggttatgagagtttccctgtgcttgattaacacttaactgtggtccctggaatttgtccctaggctttcccatatcagagacctctgacttggtgagactcccctaaagtcctgccggctgtccttaagtgtgtttgaagtacaggaaagatatttactgtagcagtcaagtcattgagactcagtacataaaaacagtaggactcaaggttctagatttgtatttttgaaatgagaagtaactacagagccgtcttgatgtatctgaatgctcatgaattggaggggggtaccagttagctgtcctccatttccaatgacaataaaacctgaagaagtagctttctgttgcattaaaaatgatttgaggttaatgatcatagcaattaatttcagaaaaaaatacacagatatgatcaagaaatagagcatagaatagaaccgtggacctgaacaagatcataaaagatcatctggttcaggcctctaccttcagacagggtattttctccattctaatagatgagacaaccaaggcccagaaaggttgaaaaacttgctgaagtcatgcactgtacccacttggtggaatttaatgccttttgatgatggggatggtatactgttttcatgctttagttattaacactaagtaaggttacagagtgtgggcttatcaggcgctgaatgtgtcttgttgaaagaagacaaagtaccttggttttcctttgaaaattagagttcaggataatttgtgaaattattcaagtattttctgtgtatgatctttctctagactttggagacacaactgtggcattccatattatcatacaggaatttgaaaatgaatagtggatggtgtatataatctactgacactttattaacctttttaaaccaccaaggtttgagacagctgtgcttcctagctcttccctgttaagagcagtccatgttctgtctttttatcttaggcagtgccttgtgttgccttaatgccttagtacaggaaaagctccagttggatgtcagactttttaaaaagtacatgaatcagtgctgcataatttctatatggcaagtttggaggcatctgctaaagaatcagtacacgtgctgcatttggtccagagagttagcagagtgcatgatggacagtgttttgtctcaaataccatgtggatgcttggatttgatatttgtaactggaaagaagtaaatggatgagccattgatagacattctggcaactattaggaacatgaatatcaagtgatagaatcccagggaaagaaaggaagcaaactgaatgtggggaaaaaaaagaaagattttaaatggtaaccaactgtcacactcccttctctttcttattcccttggaaaggcacagcagcttttaaaggtcatcagtgcttgttaaagaacacaatgttaagaagagacctcagctcggctgtagtgtatgtggtctctgtcaaagtagtgacatgctcctttttttttcttttaaagctacgtgactgggggttgtggatggaattcacaagttgcacaatgttaggcaagaatttcttagttaaacatacagaatatatatgacctcaagctagaggcgggggagggaggaggatgcaaaaaaattggtcatggttctctccactgggatttttatgaagggtgccttcaggtgcctttactatttcaaacattttttcatgtaatttatatttgattacatgaacctaagataactgagtttatttcctagccatttccaattcacatatagtgattgatttgatttatgtcacttctgggtttttctcttacaaaattctttcagaagaatataacagatagtagaaagatagatgaaaggagtaaaagcccctagaaatcttggctgagctattcctagaaactgtaacttctggactcagaccttaaacttttcgtggtatttctgcctcttggttagctgtattcagtttactatttttggaccttaaggcttacgagttttagcaccttaagattagaacttccatcaagcctgaagtatttacatatgtgggtctaatgttgtggagagttgtctttaattcctgaaaactaaagaagctaatttaaatcaacattgaaaacaaacaacagtatctgtggtaagacctgaaggaagagtaagttagaaataaacaaaaacctaagtgtagaccttgatctctcaaactactgtattgacaattgtaatttaatagtccccaagtcaccagtgctgtatggactccactgtgactgtatcaccggagcactggttctcagtgtcacctttgaaaggatttaaacacaaggcatccacgtaataaacatcataaacgcaaatgaaatgcagaacaattaagtgaagcatttaggaaaggacatcctttaactatgggactcgctatcaagtgccttctgaccaggagtgtccccagtgagaagaaatggaaaatcttaagagatgaagatcacattttacctgcatgaccagaatttgaaggactttaagttatacaccaaagtctttattctgagacccctttgattctcatacttttccatctattaggagaaatcccttctgcaaatggttcctttggatgaaggtgccagtgagagaccccttcaggttcccaaggagatctggcttctagtagatcacctattcaaatacgcctgtcaccaggtaagtgagagtagaccttccctacaactttggaaggtgtgtaactactataggaaatcacaacacctcacgtcagcatagcgcttttaactttcccaagctacctgcacacagtggcactgtcagatcgactgggtgggtggaagtgtcctagtcacagatgtcacagctgaagcatgtaaaggtaagttatttactaagacaaaggcctaagtgtagttgtggcagagccaggaccaaattaagagcacctgtctcctggctaccctctcattttccctggacagctgcacacctgagtctataatgcctactttggctatgagtcatgtaggcattagagattgtaaaatccaaagcagattttaaacccattttttaacttggtcctaatttttcttttaaatcctaactaaaatgccaccccacctcattcgcccccaaaagagatatttcttgggactaaattgaaaggtaatgttctcttacctactgacgaataatgtaacttgaaagcaaggtttagtatgagcatgcgatttcctccttccccagcgttcagtagtactagcatttgaatgtggttattctgtttggactctgccttctgctgcttgtcaagaggctacaagtaggccaggcatggtggctcatgcctgtaatcccagcattttgggaggcagagacgggcgcattgcttgagctcaggagtttgagaccagcctgggcaacacggtgaaaccccatctctataaaaaaaaattttaaaggaggctagaattagaacacctggtttcctgctctagccatctagtcccctgccttattaggtacaggctaaaacctttgaaaagatcattttcctatttgaaataacatttcacatggattagagaaatgctaaaggaaaaatgtgttattttcacacctccatttgtaattattaacacacataccacccttcccttttgcttcctgctgctcttctgatccttgggtaatcatcataacctcaggagtgattatcttgcctgtcccttcattctgacttctttggtaggaggacctgttccagacccctggaatgcaggaagagctccagcagatcattgattgtctggataccagcattcctgagacaatccgtatcctttgcgaccaaagcttaagaagctggatgagtacttgatcaaactcttcttcgcacctatatttgatttttgtggttctatatttattttctttgtaatatcttttattataagataaccactgactatccacttgtttctcatttcctttcaggaacttttgacctctttccatatccagctcttactaaaaggaagcaaggggtagataacaatgacttaaaagcatgggacatagaagccacagcactggtactattctccttcaggtgatcagtcactcctgccaccacacgtactgttgacagggcagggagaaggatgggaaacatgggcacctggtttataggactgctccagtgtcaactgtcactctgcaggctatattcccctgaccctgaagctgggccaaagctgccaagagtctttgaccaattctgtaacaactcacctgcagggcacttgaatcaataaaatatcaaacccccattaggatcaatgtgccctgaataagaggagggaaacagtccctgtaggagcttgaggaaaggagctcgtcggggctctgtgtggcctttctcctggagctcctttcccttgacttaagttgattcagctggcagcaaccactctgtggctgaagcactgctcattttcttggaagccctgccagagccagtcatctgttacgagctgtatcagcgatgtcttgactctgcttatgatccccggatctgccgacaggtgggttctactgacctggggatgtgtttgacgcagattgccccatagagaagtcgtcagttttacagagccagataggcagccagctgtctggtaggatgggtctgcatctgttattaatggcaggacaccaacattgagagttgctacccttaaattttaggttgtgttgtttcctacgatatttgccacctttttcccattggcctatttctgtttacagaaaacatagtggggtggatccctctactctggggtaaattggtgaagctgattgtacgtggaattctggctgacattaccaggaaggatgggtgacacttgggagcctttcttctttttctcttcttggtgtgtgtttttaatcctgaaatgattttaatgcacagtagctgacagtacctgtgaattggactagtgagtattgagaggagtccccatccatgctaagtgacattgtaaagaaaaccattcaaacaaaaaagaacagaaaaccattcagcttggtaggtgccgtggctacatgcctacggaaatgggaaaagaacagatgaacactgacctattgtgaggcagggtgtgcgtatgaatgtgtgatgaccacgtggcctggtcattgagtggacagggaccaaacagcacggccactcttactttgaagttataatttggaaggtattgtgttggccatgaggagataatagaagttagacagatgaaatgggtcctgcaagggttggattatagactactattacagcagctgtaagttcctcttactttcatcttccacctgtttttctcactgcctgcccctatttttaaaaacaggtgatctcccagcttccgagatgccatagaaatgttttccgttacttgatggcattccttcgagaactcttaaaattctctgaatacaatagcgtcaatgccaacatgatcggtaagagtgcttcatgcaacacggggcgtttgttgagaatactcttagtgcattgtatccagtatataccttactgcatatgcaggcacatggcagtcaatagtccttgtccccaggccctccagccctgaggttttgcttaggttatgtctgacagaagtttccgcttgtctttctctcgtcttgtagctactctcttcactagtcttctcctgaggcctccacccaaccttatggcaagacagactccaagtgaccgccagcgtgctattcagttccttctgggctttctgcttgggagcgaagaagactaaggcttttactgttctctgatattctagaagcagacgatctcgggctccaagtatttcagaatgatttaaaaagtcatgccacaggaagggtctattgcagaatttcaagttctgtttatagtaaaaaggaagagcgtttcctaatccctcctttaccatatcctacacagaaaaatacttttagacttatattgccaagccaaagttaccatattttggtgtttttgtgttttctctttataaggcaaaaagatctgtatttacactccttcacctagggatgtgtttgttgccctcctacccaattgtcatgattgtccttagtaccctaggcctagattctgagatcttcccattctaggcctacaagcactacttgctgtagctgagacttgtctagagtcctttgttttgcacttttgacccaccccttcctggatcactcctttgcactccactcccctcgttctgtcactttgaacgaagtctgagtgaggctagtgactccttgggtgtcctcaacagtgaattcactgtctgcgtgcagttattacatgcatttgtgcatttctactacaatggcatctttatgtctctgtaacattggccttttcatggctccacactgggtggaaccatattctcttagatcacatttagtagcataactgtagggactattagagatggcatctcatcgatgagagagaatcacaatcagaatggaagcactttgagtatctgaagagtgagagcattcatgtttgacaggtcctgcttcccactatccttttcctgttattattcaaattttacacaaggactaatcctgggtgtctctgagacccatctcctgcctagacatccacctccagagcaacactggccccacagtaaaagaggaagtcttgtacctcaggcaggcccatctagagctattgctccttcccacagcaaaggtattgtggatgacccttagaatccattctctggtcttctgaaataccaagggcagatgtcacctccttcctcagcaggactgactctgggctctacaaccagctccttcacataaagggtttagagactccccttggctcccagtcaccatatccagtgttgtgtaaagagactggccaacaggaccaaccaagcaccttacctctcccatacaagatgaccctctgagcttttcatttattcaagctctgtggtacagcctttttttaaaataaattaatctatattggttgacaaacaagccaccaaccactgactgcaaaactgcctgatgcagttgggttcctcctggttttcttttgttacaaccacccttgcctgtttacattaattgcaaggagcataacgtacaggctgtatgtacaatcctgggcattgactctgtgacatttctagcatatccaaggcaccaccagtgatttctcctgtttcttggtgggggtgggggggaaggtacgtattctgcaatatggctaaaccctttcctgattgagagttaaagcaataggagtcaagttactggtgccacagatctggaggtatgataggtcaggggctaggtgttgaacttagttaatggaagactgagagcagaacaggtttgtcatctccgcaaggccagaaagtgatcacaaaaagaggcagatgatagacactggggtagggtcataccacagggaaatacctttcctgggcttgttttctagcatatcactgacctgggatctttgggtgatcaagggtgtggttagtggaggctctgtgctgcacgtatgcagtatcctatctctttctacatcagatcaaaacactaagttggtgtactgcctcgaccttttttcagctcatcctggaacatatacagagttgagagttttagacaatctctaggtagaggagacaagatgtagacccagacagaagaaatctgcttccctaccatggctattccagcaccccaacctgtaattgccaagtcctctaaggtactaatttgtagctgctctgaagtaaggatttcggattcagctggtagggaaagactctgcacctgctgtcttagggaagaaatggttcaaatccatgtggtgacattgcattagtctccctttcactgttttcttattctgtaattgtttgttatatttcccaaaaacgtcttgatcactaagcaaagctgctagtgggattctatatttcgtgtcatcttttttattataatttattgcaaatttttttctgaataaatatatgttgtgtgaaaaagcaaagtgtgattttggtgaggaagcactcagaagggagggcttatgtgtcactgggttccattcgacttgactgcagtccccatcagctgtgcctgcactgtcatcacctgtcttacagggaaataccatttataagaattcttagtatattcaccctcagagatgagaagaaaccatgcgttttcagaggctaataaaggtgtcctgtactttcagaggccagccaagtacccttattttaaccctaaggattcaggcaacaaaacaactcaattagaggaaaggatgttgattcttaatgcatgtaaatgtcacactaggtcagatctgtgatccctccggccccagaaacaaaccctaagatacacatctggggagaacccagctacccctgctcagtagtctcagtagtttagacgcgcttccccaaagagcttgttttcacataatcctattttgcagcttttgaaaaccagttttgaacttttatgacttcttggggtgatcaagtccataaatttagtacttttttgttgttctaatctgaactgcctaacacgttgggaggaaaccgctgatttgagcatggtgccaatgcttccctgccaatctccattatgaatttgtggattctgattccattccctttgagactgaagaagcctcagctggaggtttcttctctactaaggccctcttccaattccctccaactgtgagcttgaccctgatgaatgtgctgactcagtgttgtcataaacaactttcaaagccccacccaaagccttggcaggagaaggtgtttctttctgagagtgattttccccccagcagatggagactgacaccagaagtttttacatagtagcaggcaatgagaatagcaggcaggtggtcagtctttccagaggttagagaggaaatggcatccccagctgtgaggcttctgttataggagacccattaggacctttctgattgcagggcaagttgaagaactggctcttggtgtagcctcataatgtaaaagccacacattgcaacagtggcatcactaaatgttagggagagaaccttagtggtgacctaatccaatctcattgtttggatagggaaagtctcagaggggacaatgactgacctaaggttacttaggttagtgacactgcatggcatagtggcatttgttttttcaagcagttctactctgcttgcccattaattcctttggtggcatcttatcaatttccgtggctgtaaatgtctgtaatacccctgattccaaatgttacgtctccacctcatagctctcttccgagttcctgcccagtatatccaattagttagctggcatctcccctcagatgtctcacaggcatgtcaagcttcacacgtccaaagtggaattcttttacttctggttcttttactaccacccaacctagatcctctacctgtcttccctcagctcagagaatgtcaacaccatctgcccagttgctggggctaagcatctaggagttagccttgatttctctctttcctaccgaccgaccacctcagcaacgtgccccacgcgtctgcttttcatcacccccactgccaattttattggtcaaggccaccaccatcatcccttcttagggtgtcgtcatggcctcctgcctagtcttctttctctctctctctcttttttttcttttttgagacagggtcttactctgttgcctcagctggagtgcagtggcatgatcggctcactgctgcagcctgacttcccaggttcaagcgatgctcccacctcagcctccgagtagctgggactgtaggcgcacattaccaagcctggctaattaaaaaaaaaataattgtagaggtagggtccccctgtgttgcccaggctggtctcaaactcctgggctcaagcagtcctcccaccttggcttcacaaagtgctgggattagaggcatgagcccaccatgccctgcctggtctttttaactttgctgccctccaatccattttccacgcagcaggcagcatgacttaattacatcagtctcatccctcccctgttgataacccttcagcgacatttacaatgaaacctaagcttcgccatggcccaccaggccctgcatcaatgggtctcaaatcttcatgtgcagaagaatcacctggatacattgttaaaaagcagattcctaggctccagaaattctgagtcagttggtctgagaggaggcacaggagtctgcattctaaatcaggacccaagagcattttgatgcaggaccacactttgagaataccaccctaaaggatctgacctctgcctaccataacccttcctcacccctgccaatatactctgatactgtccttttactcctcccagtgagctgaactctttccagcctcagggcctttgcatgtgctgtttacccagaaaactccttcctctctctttcttgcctcagtccccatctttgctgtgcctaaccctaagtcacccgccctgtcccattgactctctgccctcattcctgggcttcctggtatagcatgctggctgactgcccctgggcttgccatgtactcttccacaatcttcctcttcctctcttgatgacctcacgtacctgctccacggggcctggggaggcaggaagctatagtggttcttcacataggctctaatgaccagactgcctgagttcaaatcccagctctgccacttctagatgtgtgaccctgatcaaaagttaattgacgtctctgtgccttggtttccatgtcttttctctccagctttattgggtataattgagaagacaaattgtacgtattgaaggtgtttccacatcttaaaagtaatgatagcacctttcctcatagtatcatcatgaggatgagatcagatactacatttccaggccttggaacagtgcctggtgcctaagtgctaaataaatggcagctagtgcaattattcccaagccctccatgggcctccaggcccagaacccgcttctgctgcccttcagctcccagcaagtgactgtaccctttactttgtgaaaatgtcaaaacagccttgccccctgcacatcaaaatgtcttcagcttaacctcatccctccccctttccatctgtctgagaataagcggtcctcctcgccaagaccagctcttccacctgcacttttgagcccttctcctccaccctctctggacttttccccatcaaccatcactcctcctcctacatctcagtatgggttattcacttgacaagtatttgttgagtggctcctgtgcgccctgtgctgttcaaggtgctggggatctagaattaaaccagacaaggttgccgctctcatggtgccttcatcaagagggcagggcagggatgagggtggacagacatgcaaattaacagtacccaaggtcactacagatcctgacaagtactgtggagagtatcaaacggggatgcactcgagggtacagcggggggccttggtcaggaaaagtttatttgaggaggtgatgttttagctgagacttaaacctcaggaagccaagacaccgtatcttgatttgaatacccccaaaaagagccacacgtgcaagatctggcaaaagacattctgagcaaaggaaaagagaaatgcaaaggccctaaggcagcaaaacagctggctgtgctcaggggacagccaggcagaactctgtgagggacaggacttgctggacaactgatgagcaggaacgtgatcacagagggcctgaggaaccccaggcaggagcttgcatttcattcgacaccacagggagccatggctggctttactcagggaagtgacgtgatgtgacttctgtatgctccttctcctaaccttaggaagagtaataactaataactctagctgtcatttatcccagatactaatacatttaacatcacttttgcctttacgatagcctgataaagtactacattatcccactttttttttttttttttaagacggagtctagctctgtcacccaggctggagtgcggtagcataatctcggctcactgcaacctccacctcccgtgttcaagctattctcctgcctcagcctcccgagtagctgggattacaggcacgtgccaccacgcctggctaagttttgtatttttagtagtgacagggtttcaccatcttggccaggctggtctgaaactcctgacctcgtgatccacccgccttggcctcccaaagtgctgggattacaggtgtgagccaccatgcccggccattagcccacttttataggtgagaaaactgaggctcagagagacagcataacttggtactcggctagtggctgaccagaaaatgacttctgagcccaaaatttgtgctcttaaacacagccattgtctccccagctggagtgggcatgaaggtgagggtgcttcttaaaacccctatcccttctagctacatcccaagatttcatgtcagctagattgcctgctggcaggtcaaattcaacttctctttgaccttgaccagcttctcctggcatcctcctctctcccatcacccaggcctaagcttttggttatttttggcccctgccccactttctaatcagttaccaattgcaattcaacaaatatttatccagcacctgccaagtgcaggctaccatgcagggttctgaaggaaaccaaaatgggtgagactggtcgttacaagacaagacagacataatatttttgtttgttttgttttatttgacacggagtctcactctgttgcccaggctggagtgcagtggcgcgatcttggctcactgcaacctgcacctcctgtgttcaagcgattctcctgtctcagcctccctagtagctgggactacaggcgcgtgccaccacacccagctaatttatttgtatttttatttttagtagagacgggctttcaccatgttggccaggctggtcttgaactcctgatctcaggtgatcagcctgccttggcctcccaaagtgttgggattacaggtgtgagccactgcacctggccaatatttttttaaaagaaggaaaaaaaggaaagatggatgaaagaagggcaggaaggaagaaaagagggaggaagatgagaaaaagggaagaaagcaagaaagaagaaggagggaggaaggaaggacctccacggaaaaggggccgagatcagctcaaccgcagtctctagctggcccctcctttccactgcgcatttcccagcccctccaactcctgccccacccccccaccaataaaattcaaacactcattgcctcatgtaaggagttaaatcgcctgatgtatttaactcctttctaactaatttctcagttgccagtttctctccctgtacacatcactgcactgttttgatgtctctcccctattccagacccctgctggccccccagcccacttgccacagaagttccaatccttctgcctggcatgcaaagctctccttagtctcttccacccacctctcaggctgagtctcccactcgaccttctcatgccgttcccttccctaaactcatgcgcactctctgctttggctcggtggtctgtaccagccacctggaaccctccagcccccacctctccacctgcccaaaccccatcaaacccaaatgtcacctcttccaggaagccttttcccacaacccctgcccaccacccccctcccccgaactcctagaacctgccctctgtaccactattttaacacactacataccaaaggatgttgttgcccctttgggactggaagcttcaggagagtgggaaccaagctgggcgtattttagtttccccacaatgccttgcagagagtaagtgttcaatgatgtttggctaataaataaagattgtctgttaaagcataagtgtatccaataagtgttcctgaaatgtatatacatttaattattcattctgagctctattaactttagaggagttcatgtggtagggggggacttactgaattatattaatgtaatccaagaagataatagtttttagcaaccacacagtactgttattttctattgttttgtaggcaacaaaatcagccttgttaaatttgctttttaaaattgattctcaaagtttattaaaaaattagaactagaactaccatatggttcagcaatcccacttctagagatatatccaaaagaattgaaagcagggtctcaaagctatatttgcacacccatgttcctagcagcattattcacaatagccaaaagatggaagcaccccaaatgtccatggatagaaaaacaaaatgtgttagttctctacatacaatggaatatgattcagccttaaaaaggaaggaattctgacacatgctgctacatggatcaaccttgaggacattatgctaaacgaaataagccagtcccaaaaagcactgtatgattctacttctatgaggtccctagaatagtcaaatccatagagaaaagaagcatggtgttaccaggggctggggattggggaaatgggcagttgtttgatgggtatacagtttcagctttgcaagatgaaaatgttctggagattcattgcatagcaatgtgaatactcctaacactattgaactctacacttaaatatggctaagatgatcaattttatgttttgtgctttttttttttttttgagtctagctctgccacccaggctggagtgcagtggcgcgatcttggctcactacaacctccgcctcccaggttcaagcgattctcctgcctcagcctcccgagtagctgggattacaggcacccgccaccatgcccagctaatttttgtatttttagtagagacaggatttcactgtgttggccaggctggtctcaaactcctgacctcgtgatctgccctcagcctcccaaagtgctgggattacaagcatgagccaccgtgcctggcccctgttttgtgctttttaccatgattaacattttttttttatcttaagtgattttccaaaggcaagtctgatcacatcacccctctctgggtcccagaattcttacctggacccacaagccttggcttgtctgcttgtcatggactcaagcctcctcccacatcctgccatcccccattctttcagatgagatgaggcacattcacggtggtatggccgtagacccatcccccattttttcagactggacttctgtccttgtctgctccttgctccctctcaccacagagccaactcctcccaaggcctcagtctctgcgaaaacaacactttctctgaggagctttccctggccacctcctagcctaggctgtaacatgtccttgtgacacgctctccttgcaccctttcctctccttcactttgtaattacacatttattatttgatcaaggtcactctctcccaccagctcaggaacgctgctgaggcagagaccacatcttttcctccccttactatcatatctccagcagctagcctgatgcctggcatccagtaatcttcatcattgattattccagtgttggcaaaggcaaggaaaaacaagcccgcctgctgcttggacaagagtaaataagtgtcacctttctaaaagcaatgtggcaacatgcattaagagcctggaagcattcacactcgtaatttcacttctaggaaatcaccctagaggagcgcaatggcgtaagtccacccctgttcatctcaacatactcattagcacaaaaaacaaagcaatttacataaccttcatcaccagaagaagggtaaacacattgtagatgtttatggatatattatggcgccttttcaaataatgtttttgaggaattgtgatgtggaaaaatgttaggatataacatgaggtggaaaaggcagcatataagtaggtatgtacctaatgttcctaaatttaaaatatcagatataaagataatacataggcacaaaaatagtggaagtccattctccaaactgttaatagcagtcacccctagagggtggcatcatgggcagtcgtggcttcagaatgtctacataggagggtttagaaaccatcgaaaggtaggctaggggattcgtcttgaagctgcaagatggcctttgcttagcaagcagggttttgccttacactgcatctatattcagagtcactatgggggtgctgatggagattaggataaagcccccaagccactctctggagccaatctcaatttttttttttttttactcttatttatatgtctggttttctaaatgctctacaatgaagatgtatgacttttataatcagaaaaagattaaggaaaacattatttcatgaaagaaaggcacttctgtgtgttgggatgaatgaacacagtgtcctgctcaagcacataggcggctggacagggccttgccagcacagtcgctcaccgcagctccctcacatcacaagcctgccctctccctcgcacccgcaggcatctgtcctccagctgctgacacagctgggcagcaaaggtcccatcttgactgtgcacctcggaggcagcaccgtggagcatggagttctaaggcatgtccacgggccaagcacacttgtaaaggccatttgacaacaatgggctatacccctctacctctaacggtggccctggctttgaagagcaaggatcgttttctgattgtagctgtggccactagatggcagaggagaatgacggtttccagttgtataataaaattggtatttaaagctgcagttacttttcttatttcatgatcatttctattttgggaaattcggttgacttttctccttacagtctcttacttatggccttaaaagtccacaaaaacaaaaacttttttttttcagaactaggttaaaagtatctaaagttcatggaagtttcagcactcttcattgaacacaggtagaattaaatcacattttcctctcttgcctctttcactgtccatcaatgtttcaagttattttgaaagtgtcaacaatggttgggaggtgatctcactgctgaaaggtaatgacttcgatcttctctggagaggggtcagctgggaaggaacgatggaatcaatcgaggcagttggagaggcggggagaaacacagttgtgacctgggaagaaacagactaatccctggccagaagatggcacagcaaagtggagaggaaggagaccaaaagggaatggggcttgttacaggttcagttgtatccccccaaaatcgatatgttgaagtcctaatccccagtacctgtgaatgtgaccttatttggaaatagactcgtcacagatataattagttaagtaagatgaggttatactgggagtagggtgggccctaatctaatataactggtttccttataaaaaagggaaatttggacagagacacacacacagggagaacactgtgtaaaggcaaaggcagggatcagggtgatgcatctctaagccaaagaatgccaaaaattgccagcaaaccatcagaagctcaggatgggcatgagacagattctctttcacagccctcagaaggaaccaaccctgctgacctcgatttcacactctggcctccagatctgtgagacaacatgtttctaagcctcccactgtggtactttgttactgcagccctgggaaactaatacaaggattttggagccatggaatagtggtaaaatcgtaatagaatttcttcactcacttctaggactgttggacctgatacgtgggggtgatggctgaaggatagaagtttcctcctctaccattctatcatcccctccacaatcacatttctcatttcttttcttttttttttttttctctctttttttttttttgagacagaatttcgctcctgttgcccaggctggagtgcagtggcgcgatctcggctcactgcaacctctgcctcccaggttcaagtgattctcctgcctcagcctccttagtagctgggattacaggcacatgccaccacgcccgactaatttttcatatttttagtagagacagggtttcaccatgttggtcagctggtctcgaactcctgacgtcaggtgatccacccacctcggcttcccaaagtgctgagattacaggtatgagccacatttcttgaacgagttgtctccacttgttgtccccactttcttacctccactcacccctcaaccctttctagcccattcctctgacatgattctcaccaaggtcaccagcaacctccatgctgccaaaaccaaaggtcgtttctcagtcctcacctaacccaacctctcagcagcattccaccccttcttcaggaacactcccttcaccggggtgcaggaactccacactcttcccagagttcctgctgcctcaccaaccactccatctccatctccattgcaggctcctctactttcttggccccgccactagatgatggcatgtgctgaggtttaggcttgggtcacttctcttcttactctatactctctctctcgctccataaaccccactcactcctctgtctgcagctgtctccaaactctatctgaagcagtctgttgctgccaccatacacttcagacttgtttacagtggcattacatcctattcaggtttacatccttttttttttttttttttttttgagacagagtctcgatctgtcacccaggctggagtgcagctgcatgatctcagctcactgcaacctccacctcccgggttcaagcgattcccctgcctcagcctcccgagtagctgggattacaggcgtgcgccaccacgcttggctaatttttgtatttttaatagagatggggtttcaccatgttggtcaggctggtctcgaactcctgaccttgtgatctgcccgtcttggcctcccaaagtgctgggattacaggcgtgagccactgcgcctggccaaccatgctcatttgtttatatattgtctatacttgctttggggctgcaacagcagagttgagtggttgctacagagactgtatggtctgcagagtctaaaatacttactatctgaccctttacagaaagtttgccaaactttgatctagaccaagcttgtccaaccagtggcccgtgggctgcatgcgacccaggacagctttgcaggcagcccaacacaaattcataaaatttcttaaaacattatgagatgtttttgtgatttgattttttctttctttttttttctttagcttttcagctatcgttagtgtattttatgtgtggcccagggaagccaaaagattggacagccctgatctacactgtggtctcagccttcaccactgaaggcttggggtcccttaacatagtcagacagccagatgggaagggctccctggcagaacctcccacggcctgcgcactgggaagaatgcgaagtggggtggagccacataagttcctgtcatttgcagccgggaggcgccaggcccctcctcttcctgggtggaacctgagattcagcaagcggagacaactctttcaagaaatgtggctcacggccgtgatcccagcactttgggaggctgaggcgggtggatcacctgaggtcaggagttcgagaccagactggccaacatggtgaaaccccgtctctactaaaaatacaaaaaattagccgggcgtggtggcgtgcacctgtaatccagctactcctcaggggatatagtaaagactaatgaccaaaactcgagagaaaggagggggcttgccattcctagggcatggctcaccatctgctgccagaggacattggaagtcaaagggaggcaccagcagtgggtcagtgacagcttcagcctctgcactacatcctgaggtgtccccagtcctcatagcacatgcctgcagtctgaagacaagagagggagctgagtttcctgagccaggctcctgttcagtcaccccagaccagcttcaagctctggcccacaaagtcatctggggtctggttgtctctcagctcccctccttgggacatggatcctcacctcttgccatacacaggctccagtgtggaagggatacaggatggggcatttgggggttctttctgactggctgtgaccccagagagggaggtgtcatgctggagagttggacagccaccctctatggcgaccagccctaccacccggcctggaaacatgcccactgtggggaacccaattgtgagattcccctctgcctcaccccagttttctgggcggagatgtccacaggcaagtgtgggcgggtcctctggcacattaagctttatctgtaggctggtacctatgaaatctggaaggctggggatttcggaatctctgacccattcaacctggagcatcttgctgagtcccaccaagaatggagacctcagggcctagttgtttgatttgcgaaatgtcattttaggccacctccttaccagcgggtccactgcacaaatgtcttgctcagatccttaagagctgaggagtgccaacagcactcctgacggatgggtggccagcagcagaggcaggagccctgtgccctgccaggggagaatcaggaatgaaaagctttcccagtgctggctgggcgcggtggtttacgcctgtaatcccagcactttgggaggccgagctgggtggattatgaggtcaggagatcaagaccatcctggctaacatggtgaaacgctgtctctactaaaaatacaaaaaattacctgggcgtggtggcacgcgcctatagtcccagctagttgggaggctgaggcagaagaatcgcttgaacccaggaggcaaaggttgcagtgagcccagatcgtgccactgcactccagcctgggtgacagagcgagactctgtctaaaacaaacaaacaaacaaaaaacaactttcccagtgcttacaaatccatcttccatctcacctcggcctgcagtgtgctgtgtgaccactaagaggcactgtgaggtcacaagaagcttggagaagcgcggccaccatttcagtcccagcctccgggaagtgagaaaacccctagggaaaggtgcaggattctgggactctttgggacatccctccctggcagaaaggatctattctagtcagcagtggggacctgggctgggcacctcatgctggccgttgcgaagggtggtgcaaagaggaaaagaacagagacctaaaggggccctaattcatcccaggcaccggccactggcagatgactggcccaaacaagcccggagggccacactgcagaaccaagcaggaggcggagccgagcagggaaggcgggaccctggaggacgtcttggctcctggcttcgcgggttctttgggatgttttaggaaggactcttgacctccagatgtgtggtggttggaggtatgggatgcagtggaggacccaacacggaacaaacgggagactgggtgttgttttgacacctccctttcatgttctcacgtccatgtcatcgccaagttctttcatttctacctcctgaatatccctggaatttttcccctttgacccaaatctgctccctccacccttgtctaagccaccatcatctctccttgatgtctccaagatacggttgccgcataaaatacaggacacccagttaaatttgaatttcacataaacacagaataatttttagtacatcttgtacaatacttgggatgtacttatactaaaaaaccattgtctattatctgaaattcccatttaactgggtatccggggtttggttttgtttcactcttttgttttgtttctaaatctggcaactcgaccaagagttttcccagccctgtgcctcttcaaggctttctctacagagcagccagaatgaacatacagaaattcaaatctacccaggtcactgccttgcttaaaaccctgaccacctcccagctctcaactccatcttccactgtttccctaagcccacagcatgcccccagcaaaccaaatacactgttgcctcttaaatgtgccccacatccttctacacactcccatccctgtccagccacctaaagaattcaaacatggttatcaaactcaactaccacccctttttgtcaggctcttccagacatgtcgcctgcctcccccaagccaagcacgccctctttgcactgtatagtagccttttgtagagcacttgtttagctgtatctaaatgatttgtttaggtgtctgacttcccccactagactgtgtcctccttcaaggaaggggcccagtgttattcatctttgcaaccacagtgcacagcacagtgcgtggcccagagtggggcattcaatgaaggaaggaaagaaggaaggaagtaaggaaggaaggaaggaaggaaggaaggaaggaaggaaggaaggaaggaaggaaggaaaattcgtgattccaaatctgaagcctagatgggccactggaagtgactgcaatgacagtacaggacaccagggggcagaataacctcagttttctttaagggagaggggcgtggtacagaaagccgacttcttggctctgggcttccttctccagttccaaagagaagagttttattgttttgttttgtttttaaatcacggaaacataaaacaagaatggaccttaagagaccatgggaaccagtcctctgctttttcgtagttaaaaaattctttgcatttccacttaactatctgttttcaggtggtgaaaaacatcctttggtttgttacagacaaatcacagagaggttagaggacttgctccaaattacccagcaagtgagcagtacaaggaggcctggagcccagtgttctgcagacatgatcccatttcatcctcactgcagccccatgagcgaggcactattgttgtcttacaggtggggaacatagagaggttgtcatctgactggatcacaccgtggtagagcagggagttggatgaatgcaggcaggtctccaatcttcctttctagtgtccctacctctcttacactctcaaatctttgcttggctcttttttttttttttttttttgacagagtctcactctgtcgcccaggctggagtgcagtggcgccatctcggctcactgcaaactctgcctcccgggttcaagtgattctcctgcctcagcctccctaatagctgggactacaggcgcgtgccaccacacccagctaattgcttggcttttttgggggggttggggggtgggtgctaaccccagatccctacatcctcagcactcaagcccagaacgtcttcatgggactgacagcttctgtgaatcccgtggggaaccactgggcatcgacccaggccctgtgacagctacaaataggtaagacaaatgagggtatctgggatgcagactctagggaggcattccttcaagggcaggggtatgcctgagagtgagcccctcctgacactgtgtgccccagggtcctcacttgcctccctctaaccttggccctgggtgcagtatttgaacagaaaccctgttctcctttcctccaactgctaggccagtctaactatggagaggtctcaaggaggcaggagccacttgagctctttaaggaaggtgagatggatggcaagtgaccaccagagactgtgttccgccctgtataactgcttcattgtagagcctcaactcaatagggtacaaacacacaatgcttttctctttccacagtcatgaaccatcttggcagggttctggaggcttccccacttcagagttccctgacatgggagaagctatttggccactacttcttccaaccaacccaatccctacccacacctatgcacacacctgtccccagcagtatctacaaagacctttgttgttgaggtccccttgccctgaagccagtcctcttgaacaggacaaggtaagacaactcaaatgtgtgacctttggaggtgtccctctgacctgaggaaagcgcacatggctggctacaccactgccgcctctgctctttgccctctctccactcccctttagttgttctcataggctcagggcagagtcacaaggctgccacccaagcagatgtccaaccaggaatgagataacatgtcccacttcacagcctgaccccctatgccgtcccaatcttgatggcattctcttggaacccctcacttggccacaacactgggccaaagtctcctgatcatcccagtggtgccccaccactactttctgcttatctagacggggtgggagcagtagaacctgtttgctaagctcttaataagccctgaaggaagcattggtcccctatcattggaagttccttggcacttctttcttggaactagtcctcagctttgggcccttgttgccagttctcaggtctatagaagtcccactcacatcctgttgaatgtcaattgcataattttgtatccctgtgttccaactcctgaggactggagggaaaatgagtgtcccctcttcacctcagctattttacattggatggaaatggggcatagagtaccaaggtgccaagaatggaggaaaggataagctgggagccattctcaagtaaaagggaccttggagtagtggaaagagtaactcattgtcactcactggatgcatgccttgtgcaagtcacggaactccctgagattcagtttcttcatctgtaaactgcagataacacaaatgtcccaggaatgtagtaaagattagatgagatcatgtatgtagaagccttatataaactgtaaagcactgatcaaaggagtgaagctaattattaattagttttaaagaagccatccctaccatcaaagatcttgcagggattgggtagcaattcataagagattatgacagagggctgagctgtgggaggcagtagagagcagttgttaagagcagggaccttggtttctagctctggcacatcctagctgtgtgactttgaataagtcactgcccctctctgaacctcagtttcctcagatgtaaagtaaggatgataacacctccctcaggacctgggaggatcggatgaaatggtacacaagaagaatgagctagcacagggcttaatacatagtggtgcccaataaatgttggctgtagctagggttattaagagatcagcagccattacaaagggaaggaggggtcagggaaaatctcctatgggagattaggcttgaatttggccttgaaaacaggagacaaatttggaatgtcagaaaaagttgcatataagtaagtcttgccaagcactgggggaacaaaaaagtaaggccccaaagtttacttccatcctctctcctagatggtctgaaaagatggtcatgcaggtggcctggcccaagaggggcatgccagtgagaagccatagggaaactgacatagtgacatggccctcctactcctgctgaaattcaaacctcttcacaggcagtcgagggagaactctgggccaagctgtgcggtctacctcctactttgtgacccagggtggccctgaggccctgggcctgtccctctagccctcccctgataaatcagtccctaacatgtgcctcttggttgtcagtggataaatgcatgactccttccagggaactggtgtgcatttcagtgggggctttctagaaacaataccttacctcccagagtttcccaagagcagctggagctcttgttttcttacttgaaacctcagtggattcctccagcagtttaaatcttcatcgtttgctgaatcccaggacccaggaagcacagtttgcacctgtcttaatacccaggactcactggggccaccttcagccttggagacaagatgggccagagggagaacagctggtggcccacatctgcttttgcttttgtttggacaaagatgatgtgccatgtccttttctctgtcactgtgcattggtcagaatatgtggagttatgctgcaataacacagaaaccctgaaatctcaggggtttaacacaagaaaggcttatttctggttctcacaaaagtctagtgcaggttggatgacacgtagtaaggccaacctgaaacatgtggcctcctagaactccacagcagggggaaagacagatggagaagtaaatagtcttagtcagcatgggctgtcataacaaactagcatagactgggtagcttaaagaagaggaattcatttctcacagttccacagctggaaagcccacagtcaagacactggcagattcagtgtcaggtaagggcactctttctggcttgcagatggctgacttctcgctgtgtcttcccatggctgagagagagctagctctctggtatctcctcttacgaaggcactaatcctattggatcagggccccatactcatttaaccttaattacttcctaacaccaaatacagccacactggcggtctagtgtttcaatatatggataagggggacacaattcagcccataacagcacaccaactcttaactgtcttggcccagaaatgatgcacattaagttcactgactctcttggtcagaattagtcacgtggcccaagcttaattgcaagaaaggctgagaaatgtaggggagcaaatatttgctgagcgcaatctgtgccacacactgtcttctaggctgagccttgaggaagaaggaaagtctcgaaagtcagaacagtggctcggatgtaaagtgtaaggaaacacacacctgggactgtctgccaggcaggttcaaggaaccaagaccaggaacctggttctgaatagaattcttgggggaagaggggggaggagggaacttgtccctgtgtttggtatatttcgaggtttactatgtcttctgcccaggatgtgaacacaaatccttcatcacagatatatcaatagacactcaggaaattcagatgaattaggcagagatcagagtttttattctgtttttaaaaatcaacatattgaatgtttcccccaaaactacgtgttttattttatttatttatttattttgagacagagtctcactctgtcacccaggctggagcacagtggcgcaatctcggctcactgcaagctccgcctcccgggttcacgccattctcctgcctcagcctctcaagtagctgggactacaggcgcccgccaccatgccctgctaattttatgtatttttagtagagacggggtttcaccgtgttagccaggatggtctcaatctcctgaccttgtgatccgcccgcctcagcatcccaaaatgctgggattacaggcgtgagccactgtgcccggccaacgtgtttttttttttttttaacaatcattttccactacatagcaataggaagagggttaacacaattatgtcaaataggaatcttcaggagcgagctttagtgaatagataagcctgatatgcaagcagcacagccatggttgatttctaacttgctggtgggtctgtttttttaaacagaagatcctgggttcctttggtgggtactgggaggcagtgtatcaaacccactgtctcatagcccaaccgctatatgaactagttcaaagcttgaattggtgaagtccaaaaaagagaagctttgcttttccaacatgttcagaactgtgatgggaaaatggttgactaagtgccacatctttcctctgctcgaatagaatgtagatcattgagccatgtgtagtgacaaggtgtttttgggaaaggtctcaatgctatgaattgttattgtgctcatgaccctcccttaagatggcgtaaacgccctggcatgatcagcccacacctgcctctttaaccttatctctctgcctaatcccatagggacaccagcctccattctggtccaagaggccccaagtcctttgctgccctggggcttttgtgctggctgttctctctgcctggaatgttcttcctccagatttttgtgggctgcttccttttcatctttcaggctcagctcaaaagccactagctcatagaggtctgacaacccatataaagtcaaagtatctcccctggtaccccagaaacacatatactgtttgtcatcacccagtttatttctttgttaataaatatcacagtcatcccctatcttgttcatcaattacttacttctgaatgtcttcggagaaatttcttagggctgagcctactagactgtgagtttcccaagggaaaatagggactgaggtctctatagcctttgtctcctgcaaggtagggaagaggcagtgatgactcatgtttaagaatacttgagttctggctgggcatggtggctcatgcctgtaatcccagcactttgggaggccgaggcaggtggattgcttgaggtcaggagttcaagaccagcctggccaacacggtgaaatcttgtctctactaaaaatacaaaaattagccaggcatggtggcgggcgcctgtaatcccagctacatgggaggctgaggcaggagaattgcttgaacctggaaggcagaggttgcagtgagccaagatcataccactgcaatccagcctgggtggcagagcaagactccatctcaaaaaaaagaaatacttgagtcctaaagtagtagtagagttatcaaattcccaggtgaaagacactcctgaggtttcattgagcacctactgtgtataagtttagcatccactatgttctagggctctaggctggcatggtccttgcctgcctccatggaacttgcagttccaatggaaaaagcataaatcaagcaattactacttttaattatcatcatttaataataatgtactgatagtagtagcaatggctaactcatattatgcttatgtgttttgtgctgggcacagggaggggggttatagatcctctctgaagacacacagtgtccagcacaaaacaagacaaataataagagacatttatatagtgcttattatgtaccatgcattgttccaaacactttgcatctattaactcatttaattctcacagtggccctatgaggtaggtaccattattattcctagttttacagatgaggacattgaggctcagagaggtcaaacaggttgctcaaggccacacagccagtgagggtgaaatgagctattattagtcactacctgggaattcccctgtttttgttgtggttgttgttgatctgggttgcttaggaagtgctacatcaattcctacagcattttagatcctgtctgctgatagttgtggtaaacaaacaataccctattagatgctgctgatttttctcattgattttgtatatgatttaatagttttgaatctcagtcagaagtgaagattacctgtcagacactatgctcactacctgggtgacaggatcatttgtacaccaaacctgagtggcatgtgatttacccatgtaacaaacctgcacatgtactcccgaacctaaaataaaagttgagaggaaaaacaagaaaaaaaaagagagtgaagatttcaaaaagtcatcttggcagggaagtcatgttgacaagaattttctttgttctatgttaggatctcgcgctacccagtttaatgaattctatgtagaaatgttcccaaacaccgtgtgcttccctcaaggaatggctgaaaatgcagtagaatgtaaatatcatcatgttttgtagactgctcacaaatcatcgaaatcagtgaattcattccagcaaattcttcttgagctccaactatgtggaagctacaattcttggtactgggattacagcagtgatcaaaacagcctaaagccccctgctttcatggtacatatgatataatagagcgagacagaaaataaagaaaatgaataagtaaaaattgtcatttgatgataaatgctattagagaaacataaagcatagaaggggaatagggagagtgggggttgggtgcaactttaaatagggtgaccagggcaggactcactgaggaagtaactcatgagcaaagctctgaagggagtgagggcatttccagtagtccagcttgaggccctagtatatgtgagacctgaggcattggcctggcttgccctagatgttcctcttctttttgagcctgcttgtgtttgtcggctattgggtgaggcttggcacaagcagttgggcccaagggcacccactcatccctcctgggcttggaaagctgctgtgctgaaatgaccccacccccatgcccctcctggggacaggggacagtcaaagagccactagaggctcccaaaactctcaaaggggcaaaccctctccccagaaccttatcagtttcctggtgcaggcactgctgaggacctcagctgttgtctgtccttctgggtttctatgtttagtgtgaaggcagccctggcacaggccttccttccccttccaatccgcaacagcctgtgctctgcattgcagcgtcacttccctgctggaggttgcaatgtttgcaccaaaaagatggctttcaaagcccaaggtgtgtgtgcggggggaggggtatgtgcacacacacaatggaaggggggctgtatctcagaccctcacatttcatggattcatatgtcttttgctctgagcataaggctattgaagtcacagtcatggattcctgttctttcgtttattcaacattacagcatggggttaccagcctgactactagcatcacattgacttgaccttgaatattagcccaaccatctgcttgccatacgaccttagacaagctacctgtaacctctctgagtgttattctcatctgtaaaatgggactcaaatgcagtaccttccttgtaaggttgtcaagattaaatgagatcatctttgaaaggcattcagcaccatgcctggcacacagtaggtgtctcataaatgacagctgctattactattaattagccagggcttactgcacacccattgtgtgccaggcacagtgctaggtgctggcagagttagcaagaggaactcaaagatgagtgagacaaggcccagcttggctccattcctcacccacatgtggctgccccaaggcagtcacctcatccaagggaccttgcagctgagtgtgcaagcacctgggccctggcgtgggacccagtggggttcaggccagggagtgtcaccagatgggtgcaacacccatacccttaccctcacaaatgccccccgccccacgctgccagaatgtcacctgagtgctgagtgccgggcctgccccacagggcattgggacggagggctcagcaccaaggcaaggagctgctctgtgggctggtctggacacagtggagatctgggtcagcgtttttctgagtgaattcttttttttttttttttgagtcggagtctccccctgttacccaggctggagtgcagtggtgccatcttggctcactgaagcctctgcctcctgggttcaagctattctcctgcctcagccttccgtgttcaagcgattctcctgcctcagcctcccgagtagctgggattacaggcatgtgccaccacgcccggttaatttttgtatttttagtagagacagggtttcgccatgttggccaggctggtcttgaactcctgacctcaggtgatctgctggcctcggcctcccaaagtgctgggattacaggcatgagccacggtgcccagccttgggtcagtgttcttctgtttaccctcttcagtgtctcagcggttggcaaggcatcatcactctctaccttttcttgggaagtggattcccctccctgtcagagactcttcctattattttggggcccctttctctttcacactcattcacacactccccaatctatgtcctcagtcactactagccttagtggtcagtggatccccatggcgaaggggaagctcattggatcatagcaatatagctcactcgcccacagggcgtggcccactggaagaagaggagaggacaggacaggacttggcctctgccttgcctgatggattgtgttatctcatgcaggagggagtggggaaacccatgtggcattcgatacacagcccagtgctaaactatgcagtctgagctctatgctgtctaagaagagggcaagggcagtgagggccatagcaaggaagggagacttgagctgaatctcaaaggagaagaaggattgggatggggtggcagactccaacctgggtccagggggatgtgctcagctgtctgatggctggaagcagagacccatgtgccatgaggagtgaagatgtccattaggcccaggtgagaggtggagcatgcgaagtgggggtcagggctgggggcagaagaaaggcatagaggaaccattggccagaaggttgcagaggccataggggtagcctttttcctccaactcccattctattctctttttagcctttattttccgcaccattcccctcctctactctctttcccttttttggggtctctttgtcaccctcctcccttttttctgagtctcagttattttatctgcaagataaatgtgctcatcctggaagctggtgatgttgcctctcctgcttttcattccaattctgagatctcattcagcaagaactgctgtcttagggctgctctcccaggactgggccctgttggctcctgtggatatacatccaccagcagaaaagcctgagggtccaggccttgggatctgtgccactgcttgctgggggttgcgggacaagcctgttttgcttctcactcaggctgaagacaggtgaggatgccaagtccagaaattgctttgcttccagcatcaaatggcttcctctcagcagcacagtccctttaagatggcggggggcggggaagctagaagaagacctttgatgttgttcaactgagaaatccatcaggtgggaacaagcccggaaatgccagagtgaagggctccgtggttggctgcattggtgggtctactgcctggactttgttttctgatggtaaacgttccctgacataaacacaggcagagcagggaataacaacattcagtccccaaacaaacaaaacaggaatgggacctgtcttgcacggggaatggctcttgttgcaatgatatagctcaagaggccttcactgtggaatttcctgccttgagcatgatgaattttccattcttgtcctcgaatgaacagtcgccatagagcttagtggctggcctgtgaagctcagcaaggccctctgggaaatgggcagcttcgccttggctgagcctggtcagaggggcatgcctacctttccttgaatcagttgctactgtacgccttaaagtgccatgagaaccatcatcctcaaatgcttaaagactgagcttaaagccatcttccttttctacctcatctttattattattattattattattgttattattattattttgagacagagtttcattccatcacccaggctggagtgcagtggtgtgatcttggctcactgcaacctctgcttcccaagttcaagtgattctcctgcctctgcctcccgagtagctgggattacaggcatgctccaccacgcctggctaatttttgtaatttgagtagagatggggtttcatcatgtttccaggctggtctcaaactcctgatctcaagggatccactcacctcaacctcccaaaatgctgggattacaggtgtcagccaccgcaccacctatttcctaccccatcttatttgactccctttcatgcaccagacactccagccatatcagatgcatacccgctttccacgagtaggccattttcttgcattcctgactttgcttattctattcctattgcttggaccactctgcccacatccccatttctgcccatccaagaggcagtatgcacagtggtgatgagcatggaatctgtctaggtttgattctgggctccattgcttaccatccatgtggccttgggcaagtcatttaacctctctgtgtttctatttccatgtctgttaaaagggtgtgataatggcacttactttataggattgtggtaagacctaagtgagttactatttgcaaggcacttagaagagtatgtggtacatagtaagcattctgccaagcattaggaattaatattgaaatcctaccctctttcaaggttcagctcaaatgccacctccccagtgaatctctcctgatccaccccagtggaaatgttctctccctcctctaactttccatagccttttaaccagatctctcctggggagctacatgcctggtatcataacaatgtatgcacatgtatctgctacccgagggttgggactcttccataacttccaaagggccttacacccagtagttgctcaacagatcctgggagaaggattgaatggagttgaaagggtgataacacgacccaggaggagagcacagctgcttgttaagcctggctggcctccccaccagaaagtgagggacttgactcttcgccagcgagttatgtgtgtcacagttggtactggctcatatagatctgtcactcctcccttatcaggccttcctggtgagcactggcaaggcttggggcaaagtcaacagggaacacagtgaagggatatgccaagcagcaatgttgtcccctgatggtaaccatgaggcatcctggaccagatctgggctgctttatgcccacctgaatcccaggattctggctctacagtagagccagatcaatcttgaactaagagccaaagcctacacattcccttccctcaaaatgcaacccgctggtccccttctcatatgacttacccagttgctgctgaacttgggcctccagatgctgcccgcttgctttcccttctttccttcctggccaaagattctagacatagccagcactgccttgagtcagatccatcatccattgaggcaggactcagcacccccacatacctttaactactctattatctgatttctgttctttgctggtgctacttcttgctgaaatgacttctctgtgtgctgcaagtgaccatgacttttttgtatacatcatagcacatagcatggaggtagatgttggctttgcctgtagtagaagcttccttaattctttttggttgaatcaagggttgggagatgggaaataaagctatagtcattctggttatatttttcttaacttttacgattttgatcatgcgagtggatctctgagtcatcagggccctctatgccccttgagatctaaatgacattgctttgagcccccttctacccctgtgccatgaacagtgcaagtcaagaccccagcccaagatatttttgaatttctaagtgagttactatttgcaaggcacttagaagagtatctggtacatagtaagcactctgccaagcattaggaattaatattgaaatccttgaatgaacagttgccttagagcttagtgtttggccagtgaagctcagcaaggccctctgggaaatgggcagcattgtctgggctgggtctggtcagaggggcatggctactttttcttgatccaggcctggggtgagtgttgctactgcaccccttaaagtgctgtgagacccattgtcctccagtgcttaaagactgagcttgaagtcaccttccttttcccactctaagccaccttcccttagagtggaagaagagggaagagttatatcctcatggccttcttaccacccacgttctgcagctctgagcttggtctctgctttcacactgttgaccaaagcaccagacctagaccctttctcagttcccaccaagaaaatgtgagtagtggaatctactaaagatctttggtgggatgaaatcctgggaggtggatgtggtcacctcacacagtggacagccttcccacacctctctggctcctctgtccccttttctccctgctcctctctttccctccagggtttccgaagttgctccaaattcttcccctgccccctgaggccttggcacctataaagggtattaaatcagggatgggtatcactttctactcttcagagcttatctaagtattttttaccaacataggtagtcttgccctgtgcattctggtgccagcccttaagcaatatatgagcaaggcccttcctgtctctggaccttagtttcatgatctgtaaaatggactggaatcactagaccagccctgtccaatagataataatgcaatatgtaattttaaattttctagtagccacattgaaaaaaataaactgaagaacttagttatttttatcctttagagtagccacggggaagccactgaggaatttttaaacagtgttattgagatacaatttacatataataaggtgttcatatctaaagtgtacaatttgacacgtttcgatatatgtagacctccctgaaaccatcaccacaatcaagagggtgaaccacatgcaacattcccggaagattcctcgtgtccctttgtaattatgtatatttaatagtatatttttaatttaatttggtatatccaaaatattatcattttaacatgtaatcaatataaaatattagtgagatcttttacattcttttttttttttcatagaaagtcttcagattccattgtgtgttttacccttggagaacattctgttttgtggtagccacgtttcaagtgctccatagccacatgtggctcatggtgacggttctggacagcaaggtccatgtgatctgtaagcacctttccctctctcatgttgaaggcctccatgtgtctatatttcctgacgtgtgttcttatcattgattactactgctgttgctgctgtgtgcacagcccaggaggtggccttgctgcctgccatctggtggggacccatagtccccaccaccccacctcggctggggcaattgcaggaaaaccacttgttggaaaccctcttataccatcgaattccagagtaggctctggatggggccatctctgttaacaacagagttgaggtagatcaattgtaaggtgtgttactaataaaaagtatcaaagtttgcaaagaagtgactttgcatcataaaagaggttagattcaagattattcttattacaaataagggaggcgttatccctagaataaagtcactttccctctgacccatattcttaaatgggagaacaaagggggcagaggatgctattgcttctatgctgggaaccttagcctgtcttccctgtgctaaaatcttgagcgacgtgaaggttcactaagggagtggccatgattactacaaatttggaggacaggttattatcacaacctatgtcaatgggagcatgcttagagggcgctgcactgcaaaaaatatggaggaaacatgtaacaggggactaaggtgagacagattctccagacagagaggcctcaatttgcctggggcctggtgctattcgctgaagcacctatagaagacttggaggctaagcaatgcccagttagcccgccctggtgtgggcccagtgaaacagcaagagggtaagtacaccttccaggcccagatgccctcaggaccagccctacttttggcaaaggaagcataagcctgggttcaggcagggaaagagctacagacagttgtctttggctggcacagtagttcacatctataatctcaccaatttggaaggttgagtcaggaagattacttgagaccaggagttcaagaccagcctgggcaacatagaaagacccccatctctacaaaaaataaatcagccgggtgtggtgacaccggcctgtagtcccagctactcaggaggctgaggcaggaggattgcttgaaccaggaggtcgaggctgcagtgagccatgatcgcactactgcattccattctgggtgacagagagagaccctgtctgtaaaaacaaaaacagaaaaaaagacaatggccttaatctccccctgctttccctaggcctaaaaggtaccctgccttttaggcagggtgaatcgggtgggggctgcctgccttcctcagagagagggaaggaagcaaggagtagggggtctgactggggccctacagctcccaacctcaagacctgccttttgaggccatagagaagctgcagctttgcttttgcagctgcagcggcagtgaagaaagcaggagggcatcctgaggcgggaaatgcctgtcagtgtcatccccagctgcttccggcttcctccttcaaggattccaggggctcctctgtaaccttgccaacccctctcccctgccccaggttctggcaggcagctgtgcgccccccctcagggcccacgtcacaagtcctcagaggggctgtcaactccccattgttctcggggcttctggggcttctccggcattcctttggctcatgaggggaaatgcctgaagcttcgtcttcacctcttcagatgcttgacctaatagtcacccggccctcctggcccctcaagggatgctgtggtgcgtgggagaatctggctaggctagcactacaagtacacttacctcaggtcaaagatgaaatctgagggggtacctaggcctctgtgtcttgaactcaccttgaaggccccagccaagtatttccccctctccctcctgagtattgcacacagctacccgcagagttacataaacacagccatactcctccattccaaattctacccattccacacagttctgtacatgctctcacatgcacactcccacccaacccatctttccaggggagccatcaggtgtgtcagggccagaagctacttttgctgtgggtacaggactgacattcttccaggaagcctcccctgactgacaggcaaaacttcctgggtagaagctgaccccagtccccatctactatttaaaatatggtgggtagggaaggttttactggagaaggtgatgtttaaagcaaatactaaaggatgtgaaggagtaaacaatgctgatattcaaaagaaggacattcagggccaagggagaaacaaatgcaaaggccctgaggtaggaatgtgcctagtgtgaataaagaataacaaggaggccagtgtggggtggagggctcgaaggaggaggagtaggaggtgaggctggggaagtgatggagaccagatcctgtggggcctcatttgcctttgtaataagagagatgggagggagttaccagagggttctgagcacaggtctgatatgatctgacttagattgtaagtgattattccagatgttgtgttgagaatagactgtagggggacaagggtggaaacagggagattggttgcaataatttcttgatctctggcaataatccatgtgaaaggtgatggtgtcttaggccgtggtggtaatggtggatgtggtgatacgtgagcagaatatagatatattctgaaggtagatggatttgtcaatggattagatggaggcgggatgtaaagagaacaatcaaagatgactcaaaatgtttctgcctgacaagagaaaggcataaaagtcatccaaataaaaaagaggacatcgggccaggcgcaatggctcacgcttgtaatcccagcactttgggaggccaaggtgggtggatcacgaggtcaggagatagagaccatcctggctaacacgatgaaaccccgtctccactaaaaaatacaaaaaaattagccagtcgtggtggtgggcacctgtagtcccagctactctggaggctgaggcaggagaatggcgggaacccaggaggcggagcttgcagtgagctgagatcacgccactgcactccagcctggctgacagagtgagactctgtctcaaaacaaaaaaagaacatcgaattatctctattcattgacaatatgactctacacctagaaaattctaaagatttcacctaaagactgctagatctgataaacaacctcagtaaagttttaggatacaaaccaatgtacaaaaatcagtaacatttctatatgtcaataacattcaagctgagaaccaaatggagaacacaaccccatttataatagccaaaaaaagaataaaatacctaggaacacagctaaccaaagaggtgaaaggtgtctacaaggagaactacaaaacactgctcaatgaaatcagagaagacacaaacaaatgaaaaaaacattccatgctgatggattgaaagaaccaatattgtgaaaacgaccatactgcccaaagcaatctacaaattcaatgcaattcctatcaaaatgccaacatcatttttcaaataattagaaaaaataatcttaaaattcatatgtgtattagcctgttctcactctgctaatgaagacatacccaaaactgggtaatttataaagaaaaagaggtttaatggacttacagttccacatgactggggaggcctcacagtcatggtcgaaggtgaaggaggagcaaaggaatgtttcacatggtggcaggcaagagagagcgtgtgtagggaaactcaccgttataaaaccatcagatattataaaacttactatcatgagaacagcatgggaaaaacccgcccccatgattaaattacctcccaccaggtccctcccatgacatgtggggattatgggaactaaaattgaagatgagatttgggtgggaacacagccaaaccgtatcaatatggaatcaaaaaacggccagaataaccaaagcaatcctgggcaaaaagaacaaagccagaggcgtcacattacctgacatcaaattatactacaagggcacagtaaccaaaagagcatggtgctggtacaaaaataaatacagacacatagaccaatggaacagaatagagacccctgaaataaaactgtacacctacaaccaactgatcttcagcaaagtggacaaaaataaacaatggggaatacccaataggacaccctactcaataaatgctgctgggaaaactggctaaccatatgcagaagaatgaaattcaacctctacctgttaccgcatacaaaaattaacacaaggtggaataaagacttaaatgtaagaccataaactataaaaatcctagaatcaaacttaagaaatactcttctggccattggccaaggtaaataatttataactaagtcctcaaaagcaaatgcaacaaaaccaaaaattgacaagtaggacctgattaaactaaacagcttctacacatcaaaagaagccatcaacagagtaaacagacaacccacagaatgggagaaaatagaggcaaactatgcaaacaacaaaggactaattaatatctggaatctattaggaacttaaactcatcaacaaggaaaaaaacaaacaaccccattaaaaactagacaaaggacataaacagacacttctcaaaagaagacatatgagtggccaacaaacatatgaaaaaatgctcaacatcgctaatcagagaaatgcaaatcaaaaccacaatgagataccatctcacaccagtcagactggttcctattaaaaagtcaaaaataacagatgttggcgaggttgcagagagaaaaaaaacactcatacactgttggtgggattgtaaattagctcagctcctgtagaaagaagtttggagatttctcaaataactgaaaatagaattacaacttgacccagcaatcccattactgggtatgtatccaaaagaaaataaatcgttctaccaaaaagacacatgcactcgcatgttcatcgcagcactgttcacaacagcaaagacatggaatcacatcagccttggtgcccatcagtgtgactggacaaagaaaatgtggtatatgtacaccatagagtactatgtagccataaaataaatgaaattgtgtcctttgcagcaacatggatgcagctagaggccattatcctgagtgaattaacacaaacagaaaaccgaataccacatgttctcacttataaacagcagctaaatattgggtaaacacagatataaggatgggagcaatagacactggggactccaaaaggtgggagggaaggaggagggcaagggttgaaaaactacctaccaggtgctatgttcaccgtttgggtgatggaatcaatagaagcccaaacttcagcatcacacaatatatccatgtaacaaatctgcacatatatcccctgaatctaatgttttctaaaaaaaggtttctgcctcagccacatgggaattgtcatgtactgccatttacttcaaagggaccaggtatgcaggaggagaggatcaggcaatcagtgctggtcacattatgtttgagaagcctattggacatccaaagggagatgatggataggcagtttagtacatgagtctggagctcaagggagatgcctataactttcctattttgttgttgttattgtttgtttgtttgttttgttttgagacagagtctcgctctgttgccagactggagtgcagtaccacaatctcagctcactgcaatctccgcctcctgggtaagtgattctccagcctcagcctcccgagtagctgggactacaggggtgcgccaccacacccagctaatttttgtaattttcttagaggtggggtttcaccatgttggccaggatggtctcgatctcttgacctcgtgatctgcccacctcggcctcccaaagtgctgggattacaggcgtgagccaccacgcccagctcctgtgtgttttttatacttgtccagtgcattgtatctataaacaatttacaggattgctttatgagtgttcgaactttccatcaatgacttcctgtacgtatcattttgcaacttgctgtttttgctcaacatcaagtttttgagatttttcacattgaaacatctagctctttccatttaactccatagtattccattatataaatatgtcccaatttacgtacttactgccctattatcaggataattggggttgtttggatttccgaatgcttctttatactccacagagtgtgatataacgctttgtggtgctgggcacacagatagtaaatgattgagtatttctgttcacctgcatctgtgtgcctgggatcattaattcccaggcaacagggaacacatcatatctgttgatttcacaaggacttatttactaagctaggaccagctagatttctccccggtgatatttggttagctgtgttgtccaaggtgctggaaagtaacagcaatagggcaggtgccatggctcacacctgtaattccagtactttgggaagctgaggtgggcggatcacatgaggtcaggagttcaagaccagcccggccatggcaaaaccccatctctgctaaaaatacaaaaattagccaggtgtggtggcgcacacctgtagtcccagctactcgggaggctgaggtggaagaatcgtttgatcccaggaggcggaggttacagtgagctgagattacatcactgcactccagcctgggctacacagcgagactctgtcaaaaaaaaaaaaagaaagaaagaaagaaagaaacagcaatggtttttactttgctaattatcgcagaccttagtggcttaaaacagtgagtttattatttcacagtttctgtgggtcagggatctgagtacagcttagctggaccctccgcctcgggccccctcacaacctgcagtcaaggtgttggccagggctgcagtcacctcaatgctcaacaggggaagaatccatttccaagctcactcacatggctgtcaacaggagccttcaggtgctcactggctatcagaccagagccacagtttcttgctggctattggctggctcagttccttgcaacacagaactctccagaggacagttcacaacatggcagctggcttcctcagagcaagcgagtgagagatggtgagtgtgtgagaaaggcaggagtcagtctcacaatttaatcttggaaatggcagcccatcatctttgccatattctatttgttagaagcgagtcacttagtccagcccatatgcaaggggacggggttagacaaaggcaggaataccaggatgggggattactggggactatcagagaagcttccaagcatggaaaccaaaggactgaggtgggggcaggattgattggctgaaatgcctgcagagaccttgaggaggatgaagagtgaggaggggcatagagtgaaagccagagagcaggagtaggaggatggaaaacgtctggtgtagaccatttgtctcagaactttggtggggaaggtaaagtgtaagaaatgtcagtggagggacaggggatctctgagcacatttgagggccaaggggaagaagccaatgcaaatggtggaggggaaggggaaatgtggacgccaggctcctaggagaagaggaagggcatcttgtcacctacccctgaacatttctacagtgctctgtaggtaaaaaagtacttttccataaacagtttacccttgaacaatgtgggtttgaggtgcactggtccacttatttgtggatttcttttttcaaccaaacacacactgaaaatagagtattcgcatattgtgaaacctgtgtacatggaggggtgactttttgtgtatgtgtctcaaagggctgactgtgggacttgagtatacatggatcttggtatatgcggggtcctggagctaaacccccgtggataccaaaggatgactatacaggcttgcttgagcctcctatcaatccagtgaggttagcagaacagggatcgctttgtccctattttagatgaagaaacagatgcagagaggtgacatggtttttcctaggtcatataggcaataaacggccaagccaggactagaattcaggtatccaatctctaagtgtttctagtctagtgctggcttctcattaggcctcagcactttcagcatgctgctcctctgctcaagtcctctcccttgtgtctgtaaggtcgagaactctcttcccccacagggaactgaatgagtttccagttcaagcaggccaggcaatggctggaaatgagtgagaattccttgactatcaatcaaggggctgtaacccaaattaaggttgaagttgtgagagtggtgtggggaagcccctgcatagtgggctggtaagatgcacgccacgggtcagtgggactctaggcccagtgagggagtgttgtggggagcatccacgtgggccaagtaagggccggcatggaagacaggcgggctgggagcctggctctcactgcgaatgagctgtccccattatttcctcttccagccactcagtcccgctggctctccaagcagctgacaagcccagtaaaagagtttccatccaggcctggaaggccccagtgagagctggggagctgcttttatccagccttggcaaggcctttcagctggagtccagcccactttgggcaacatttggaaacttactgaggaaatggaggtctcctttttaggaatcctgccccacccctgctcccaccatgggccttagtttttccccaggaaacctggagcaccttgagactggagactgtgtctaccccagcaggcaggaaaccaggggctcaaacttccaagccctgccctttgtgagctcctaggatacacacaattcattctgaccctgggacaaggagccagtgaaccagtcatctataacaacctgagctacacagggccccagagaaaccttccagaccctcatttaccagctaaagaaattgaggtacagaatggggagggatttggtccaggatcacagagccactgagtggcagaatgggagggccatagtttggaggagactcgatgctcaagaaaaagggactgtcaaacagttaaggtaggagttcctctaagcagagtttagagaatcgatccaagaaacacttgaagcgtgcgagtggcatagactaggtgctcaacaaacgcagcataaataaataaatgaaactgattgttgctgcaggggagctgggacggactaggccacgagaataaaaaactctgccctggtctgggtcctgctgggtccagatcagtgacactagaatagccagcctgggcttttttcccatgggaaagtaggacaactctgaccagaaactggggtaatggcaatgagcggagggagtagattaaagggagagatgccccacccttacttgggataaagagctcccctcttgcttcccccttcatttttactgattgcttacttggtgccaagcattatcagaaacacacacacacacacacacacacacacacacacacacacacacacacatagcattaacacacatggtccctatgaggcaggcactatcattgcctccatcttatagataaggaaactggccccgagaagttcagtgccttgcccttagtctcccagctgataagaagtaaagctgggatctgaactcaggccatctgacttcaatacctatgcttctaaccactaggttatactgccatttcgctgagcaaggcagcttgtagtggagctgatgcccctgcggattgaaggcccactcattcacacactcacagccacccctgcttggaggtggcatagcagggaacaagttggagttgccagaggccccaaggtctccaccctacctctatcttggagcttaaagtatctcgctcctggcctcttttaggaatggtagggccattagcccaatgaaggctttgccatgagtttctcagacctttgcagggatagcagggccctaaggagactgaaccagggtggaaaaatctgaataggagtggaagaggagggtacagggcagcccattattatctctggtcatttaacacttcttaaacacctactatgtgcctgtacagggggctggaactacagcaatggaccagagacctgtccctgcaattagagagctcacagtctagagggggagagcaactagcaaacagactacagagagggaaactgaggcccagagaggtcaaaggccttgcccaggaatactcagtgggtgagtcacagagctgggcccagagtcagtgctcagactcccaatccagcatgatccctgctacagcaaaagcaagcaaatgcaaacaagctcagatgaaagaggggtgttatgaactaaggagaggcatgaggcaggcagggttaggcagaagggctatcttactggaggtggagttcaaaggagggtgctacagtctgaatgtgtcccccaaaattcatgtgtcgaaacgtaaagcgaatatgacagtattaagaggcagggactttcggaggtgagtcatgagggtggagcattcatggatgggattagggcccttataaaagggcttgaaggagttggtttgttggcttctcctcttctgccatgcgaggacacagcattccttcccttttgctcttctgtcctttccaccacctgaggacacaagtgttcctcccttccagaggatgcagcaacaaggtgccatcttggatgcagagagctgccctcaacagacaactgaacctgccagcagcttgatcttggacttcccggcctgcagaactgtgagaaagagatttccagttataagtgacttagtctcaggtatgttgttatagcagcacaaacagactaagacaggggaaggatgccctggtggaggggtgcgactggagaaagctcagtgctcagtgagccccagtgaagtcccaggaaagccactggcagcagcccacacgcttgggcggttcctggacagccaaaggaggaaccacacccaccaggcccaccagccttggacgtggcccagcaaggccaagcgtttagtaattggcgaagtgactgtctgctgccgccccagtccaaatgaataattatggaatgtttacatgatgtggtgttcctgacaccttctcaagtttccatggcaactaggaaccaccgccccacccacccccaacccaacccacaagatgttctgtctgttgtggccagcagctgtgtcatgttgtgaataaataacacatgcctggccttggagactggagttaccctacagtcatccctgacagggcagacttagtgaggggatggggctgcagcaggcagtaaggcgtctctaatgctttgaatgcattcacctgcctcagcccaatgtcaccagagataggccatgggtcagcgttcatcccagtggtccctcctggagctagtaaggagacgtccctgctaaagagatgttcaatgtttaatacacccaagcttcagtttactccccttgagcttttgttttctcatctgttgaagatacccatgcctgtctcaataactttttataaagaagagataagatgacaaccagggccaggcactgtggctcatgcctacaatcccagcacattgggaggctgaggcgggcagatcacctgaggtcaggagttcgagaccagcctgggcaacatggtgaaaccccgtctctactaaaaataaaaaaattagccaggcgtgatggcacacaagagaatctcttgaatccaggaggtggaggttgcagtgagatcgcgccattgtaccccagcctgggcaacagagtgaaaccctgtctcaaaaaaaaaaaaaaaaagaaaagaaaaaagaaaaagatgacaaccaaccagcatagaaagcatatcctaccataatggctagcacttagtaggtgcttaaaaatgtcacatctggaaggttcgttctaaacatttgtgcctgcccccacaacggaaacttctctcctccccagatccccagatccatgaataagtggaagggcagaagctccagtggtcttctggaagtcagagaacccaagttagaggtcaataacgtcctggtggattgggagtaaccctacaaacgtgagactcttgttttagctctgactgtcctaatggctggcgatggggccttgggcaagtcacttgccctttctggttctcagcctctctgtctggactatgagatggagtggcctagaccagaggtttttcaaattgtgttccacagaagcttgggtgcctcagggaactctgtggtagggagagggatgagactgaatgggtggggctctgggcccctgagcctgctttgatggaatttatatgtgccaaggctttaaaaaaacagtttgaggccaggcacagtggctcacgcctgtaatcccaacactttgggaggccgagtcaggtggatcacctgaggtcaggagtttgagacgggcctggccaacatggcaaaactccgtctctactaaaaatacaaaaataaaaataaaaataaaaataactgggcgtggtggcaggcacttgtaatcccagctactactcaggaggctgaggcaggagaatcacctgaacctgggaggcggaggttgcagtgagccgaggtcgtgccattgcactccagcctgggcaagagagcgagactccatctcaaaaaaaaaaaaaaaaaaagtttgaaaactctgaccgcatgcttttggctttgatagggaaagagagctccttggccacttcctcaatcccagagtgcatgagttccctggcctgggagcagatacaccaagagaggcactggatcccaaaggtaccccaaagctccattttctcccacaccacccatcctgagctgtctttctgtcccagaactcctctctgacagttccaactgcccaaaaccaggctacttccaccagatgccctgaggaacagtatggcaaggggccctgggcagggaagaggctgaggaggaggaacaggccctggccacctctttcctttaggagggtacgacagttcccagtggcccaacctcccagggcgttctcccagagtgtggagggcgggggcctaatctgcatttgggacaaagcctacccggtgctcgagtgttgttgtcatggaaactcaaaaggtgttattagcatcttttcaactcagtggccctgtgtggtccagtccatgcaatcttagcagtagcacaccatcaccctggcaacccattagcctagtgttgttaccatggaaactccagtaaggtcgatcagtccgggaagttcccagaggagataggcactgggagatctgcccagcagtgcctactctgagggtctcccagctgacagtgacctgctctgcatacactgacagtagtttaggatcttttccggagcgagctaacagtccatgtgacaggaaagaatttggccctgcagactggcaggtctatgcctcgttaccatggaaatgctgcttgtcaggatctcaaagcacagtgcaaaactaactcttccaggagactgaggctggcaggaaaggaggctgtgagcctgttcttcattcacatgcccattcattcattcattcgttcattcagtatttagtgcacgctcattaatacagtgggcactgcgtatgtccgaggctctaactggagcaaacaggtgggctcaccaactctcttcaattgaaaagtatattgaggtggaggggaccatcttacttcctgtgtcaacctccactggaggaaaaggagttgacatgcccaaaggaatggaatcggggggtctctgtgtgtcgaggggtacagggagaatacttgctttctgtagcctcctgtttttcacctatcccctgcttaagccttcaggaaacagatctttgtgtggtctggatcaccaaaggcttggccagacatgctagaagtttccagcagccacagctaagtgaagttagaacaggctacgttgggaagcaatgagctccccatcactggagatgtacaagcagaggcaaaaaatcctgctcagtgagggccatgtagagcccgcagagcacaatgattcagagctcagattctggagccagatagccagtcttcaaatcttggctcagtttaccagctgtgtgactttgggcaattcacttaatcatactgagccttgatttcctcatttgtaaatgggaatgataagagtttcttcctcatgggcttgttgtggggatgaaatgcgtataatatataaagcacttagaacagtacctaacatataattgctcaagaaatggtagcttgtattatcccttgatggcccaactaaagtccctgacaagcttgggattctatatgactatgggtcactaatcttcctgcacacggaaaatcagaaagggactctggcaagggtaagattctgtgctgaccagagagctggctgagggtagcacctctgagctttgagctcatcaccacttgcgtgcttccagcaatagttttcctttccaagtacttttggatccatgtctcaattgggcctaaagacaacagcaaagggcacagttaccatcccctgtgatagataatgggaagtaaagctaagagcgggagagtggctcacctaccaagtggcacaactgggatggaagctttctctctgtcacaccacctcacagtccccagggccgccataaggggaggacagcagttgggaaggagcaagtcatgggctgggcggaggaggagcccagcatgacaataacctatgaaaatcagctttccactgtctgcacttctgcaaggaggagttgaggccaaagccagggagcagaagggggtatttcctagaaatgcggcgggagtggctggtgtgctccacccatgggcaaaggacaaggctcggcctgcgtgtgagcactcacttggagctgaacttggagcctccagagctcccatccctctgagctcactcagaaagctttccctttgggcaaagtccaagggggtcattcaactgtgatctgacacttctgctttcaacttaatagctcaagtatttaacggatggctcatggcctcaccaagggattttgcttgccgagactagcaaggtgggctagtgttttcatgccatttggaggagcaatgagaaaggattgtttaaaaaaaaaaaaaactttgcctgagaacaagagtaacgccctaactcatggcctcatgaagctccaggttaaaatgcacacgttacctgggagtatgggaattggacaggggcaatagtgaaaaatctttaatagccagcaaggtctggacaccaactgattagaatgtttgctggccagaaacacgctatagggatgcaccagcccagatagaggaaaacagcagccctggatgtgggccttggcaggggccgggtgaagggagggtttgctccctgagaggtcccatgagcacacgcaggaatcagatctgcctatggccaccagaaggtatgagatttcccacagcagctggtggtgggggggtgggcagggttggtgtatctggtagggggaaaactggtgggaacatggggttcactgagggaagagctccttgggacagctcgagggccagacagcctaggacagtcctgtaaggatgcaaatggggcctggcctggccttggagacccagatgctgccctctgccctcacagacttcacccctggtgcctctgggtggcaacttctctccctctctcagtgaacatgcatacggactataatatgctacacagcgtggagcaaatatgcatacccattcggtgttcacacaagcacatgcatggagcccacgtatgcccatgacctgtagaggcatcctctcaagtcagtggggcacacccacaaaattgttcagactcagaatcttggagcagaagcaattttagagctgcccccattaaaaaagtcgtctttgatgaacgccagtcagccactcctctacacacactttggcgtttgctcgttctcacacctcctgcagaacaggaaagaggagatgacctcgggaactttcttaaaatggcctgtgcctagacttgacgcaagcctgaagaagtccctgcagttccaggactcagccagcagggggcagcctctcatgacacactgggtttcccccaaagaataagcaggcttggagaagaaagagaggccgactgcaaagaaagggaaacatataagaagtttccagagtgtccggccatcaagctgacccagatgcatgtagccagccactcctgtgggtgaggaattctcagcccctcatattcagctggtgaattgatagagtctggggcaagttatcagaagaggatgtcttagtgaccatagtacatcctgcttgcccagcctagagccacagagggaatcagccagcacacaggagttcagtggaatctctcattctgcaagtcacagcctctctcagggcctgcttcgttgtctgtgaaatgggtttaacaataaatcacatctgcttcctcccaccttggtgctttggacacaagccctgtgctccctctgctgagacctcctttctccagcttaacccctactcactcctgaggtgtcagctcccacttcacctccaggaagctttctctgaccccagatcgtgcactcagtgataaacttcctagaggcctgtttttcgcctccagggcccttgccacagttcctggttagacattcggttgtgatttttgaataacatctgtttccctctccaggtattaaggaatgtggtacaaagtaggccctcaataaacattcagcgaatgctgagaaatgaattcccatagctcttttacagatcaaaaagcactttcacatgcaaacagggtggtcttcatggtacccgctgagaacgatggggttttttccccgttacacacacagcactctctactgtaccaaacattttaacttcagaaacttcagtcactagaagcccgagagggagccagggattcttacttccattttagaaaaggtaaagctgaggcctagaaaggtgaagtgactgacccaggcttggaacttggaggagtcaggatgtttaagtctccgcatcccatgctggaaggtatgatcattacattccctcattatcactgtcagcatcgtcacctccattgtggctatggccatgcctagtctggtgaggaggtgtacagttggcgagcacaaaggcttttgaaggtggcgggcagaagtctgggttccaattctggcctcacctgcaggtgaccatcggggctaggagagcatccagggaggattcatgggggaggggagccttggctggcagttggaggacccggagaattggaggaaggtggagaacctgggaagggaagtctggggaaactagaagagcactggaaatgggttttgggtgacttaggctgaggctttccctgcttctgcttcctaaaagatgggtatgaagctccctccctcgcaggtcctgctgaggccggtgcgcaggctcagggccaggagaacatccctggggttgcgggggagtggtacagagggcgctgtggctacaacagctaatgagggatgtcacaccctcaccacacacctttcgctggtgcctcccagaggaaaggtgaggaccaagtctttctccactgttcctcctccactgtcccttgcatggtgtcctgcacagagtaggcgttttttttttttcttttgctgttgtttgttttgcttgtttgtttgagatggagtcttgctctgtcgtccaggctggagtgtagtggtgcaacctccgcctcccaggttcaacggattctcccgcctcagcctcctgagtagctgggactacaggtgcccaccaccacacgcagctaatttttgtattttgtagagacgggtttttgccatgttggccaggatagtctcgaactcctgacctcagatgatccacccacttcggcctcccaaactgctgggattacaggcatgagccaccacgcctggccaagggtaggcattttttagctgattgttttggggtaggggtaggccaaagagctctttataggcttgggttctaaaagtttgggcatagattgagagaaggggagctccttttgaaacttacacaaggcatgggacctaaaacttgacaggcaatttgggagtgggaatgggggtggggcaggctgtggagctgagctagagggtagcccagagtagagggaaggatgaaagaggataatcagatcagaaggtctctgcagtgctggaggtggaaggggctgtgtggtgagattccctcctccatccccctgcactcctcactgggacctttttcctccctgctttgtttatcctctcttatctttccatatccctcacatctgaggagttgggaatttccaaaggagagaggaactccaggcttccagaaagctcaggagcctagagacatgggggatgaaaccccccataacgtatgccaaagtcaccagcctctatccctacacctgctggggagggagccagagatgtctctgcctagatggaaaaagaggcaccctctttccaacaggcctctcacagcccccaaatcacaagcagttctgttgccctgggactgagggtgccaaagcgaagcccctcccctacagacgagaggtgactgcagccctggagggaatgcttggcatttcagcagtgcctttgccttcctttaaagcaatgccaccttgtttctctcagttcgtttgcacataccacagaagatctttagactaatggcttaccttctcagtgactcagtttcctcagctataaaatgggattgtgatggggactgactaagtcaggacaggtgaagttcctcaaacagtgcttggcacatgagaagcgctctacatgagtttgctaggactatctagctatgttccttaagcgttcacttatcctttctgagtcccactttcttcatttgtaaaaataacagggcttagggtactgaatgatctctcaggctcatgtcagctctgcccttctatgattctgtgtgtttaaggtagggaaagcagagattgtcatcctatgaaaatagatgagggagaaccaggacccctgatagatgaacagacctgcctggagtcacacagccagttactgaccaagctggggttaggatccagagctcagaaccccaagtttcacaccaccaggctagctctgcagcagtgtgccaattttttaacattcagggaagatcagaaagcatttaatttgtgcaaagggagaagtatggaatggaggttccagcaggccctggggttatgggaagcttgtgcaacccacgtaacccagcagtggacttcctcactggcttaggttcccattttcctgccatatgcctaattcttctcccagagctcctccctacaggtccctgggtcaggtcctgaattgcctctggagggcagcctgaatcaccccccactgttagctgggaccccaacaaatccctagtcacaagcaggtgcttcacatctacccacccaggtgtcctgggcaggtgaggaggctgagacccagaaagggccaaggaaagactttgctaagctacccagcaagccctgggtagaagcagattcaggactggaacccacgtttctgagcccctggccttgtgcagaaaggaaccccaatggccaagcaggtgtgctggaacaggtgcctggctccacaattccagacagatcaggtgctaatggtgagcacttaacacctttggagaggcctcctgggctgctgcccaagctaagcttctacaaggaaaaatgccgaggacgtaatctgtccctggggaggccctaaaggttatctgggagaccggaaatttctagtgactgaggcacactcatggtgggaaagaggacccttagcagaagcagggaagctatcatagtttgttttctgtagccacagactgggtaacttataaaaaaaatagtttatttagctcacagctctggaggctgggaagtccaagggcatggcactggcgtctggtgagggactttttgctaaatcatgacgtggtagaatggcatcacatggcaagagggcaagagtgtgccagctcaggtctctcttcctcttcttataaagccaccagttccatcataggggcacaaccctgatgaccttatttaattttaattacctaccaaaggcaccacctccaaataccatcaacatatgaatttagggattaaatttccaaaacatgaagttgaaggatgcattcaaaccatagcagcagctgacctgagccggggacagacccaggtttgaagctctactcacccatgagtggctctatgaatttgaacaagtgacctcacctccatgagcctgatttttcatctataaattggggtaatgatggctgccctgtccagttctcagggctagaatgaggcttaacagagataataatagctcccacttggtaggcttgtaacatgggccgggcactgtgccaaacactttccctgcatcatcgcggtcaatcctgaccacagtgctataaattgggcagcagcatcctgcctaaagcagaaacatgggctcatccagatcaagacccttgctgcaaggtcacacaggtgagtaaatggtagtgccaggatttgaaccctgatctgactccagacttccccttccactggaatcactttgttagtatgattattatcagaggccatctcataaccagtgtattaaatcacttaattctacaccttgctgcagaatgtaagtcttccccttggactccaggcaagggttcaggggctgagttgaagggcttgctgatgcttcatttgagacagggctgggaagccacctgcttttataaagatttttttggaacacagtcatgtccactggtgtatgtattgtgtatggctgcttttgcatgtgccaaaaactttacctgcatcatcacagtcaatcctgatcacagtgctaaaaagtaggcagcagcatcaaactcaaagaggtttgagttgagatagagaccatatggctcaaaaagtcaagaaaactatctggctctttacagaaaaagtctgttggcggctgatttgaaacattcaaggaagtgtcctggatgcggcttgggcctttggctgaagtccaagacagcggcaaggggagtcccttgctgggctccttctctgagcactggccactgcataggaaaagctggattttcaaaggagtcctagagaagaagccttcctttcaagagttaccaagaaatgctggctgagtcagcggcccttctcaagccaggagaggaagatactgagtaaatctctgccatctcctttggcagttagctggcacaggcacactctggtcagaaagaaactttggattgagaaatttcagttgagtaacctttaggcttggagaatcgaattctataaggacttcagaatggctgctcaggccaggcctcatggttccctcaatacggaggagcccagcccctacagggggtaccaagccagctaggcctacagaagagtctgaaatgttagatttctaagcagttatggctcattttacaccacacctggggtcctgaaaagctgtgtgtggtctgagtctgtttgcctccctaatctctgtcatttcagaggctgcctaattccggatggatttgaaagagtgttggttttcagattctctgcccccactcgtcaacctctcagttcaggacctccggtccagaaacaatcagttaagtgaactcctatttcttttcctaagctctgcattttgaaaagcaatgccctactctgcttctgttgtatttatttggtctagatatctccaaagggtagtagcaacgcatatcatatgttcagccttcttttggtttgaggtctaattatctttacagaagccaccaactttcttttccttatcccctgccccaaggaggtcacacttggatccacccaatagtatccagttgactacgtaggttccatagaccctggtggctgctcccccttccttgtccccgccgtctctgcccatcatcctttcaccaacttaaccaaatgctattgtgccttctagggcctgtttttatcactcagcctctattagctttccctgatcccaccagtccacactgtgccctcttgtactatgagtttgtattgtacttactaagaataacaaacatagctgggcatggtggctcatgcttgtaatcccagcactttgggaagccaaggcaggcggattacttcgggtcaggagctcaagactagcctggctaacctggtgaaaccctgtctctactaaaaataataataataataaaaataaataaataaataaaaatacaaaaaattacccaggcatggtgatgggtgcatgtaatcccagcttcttgggagggtgaggcaggagaaacatttgaacccaggaggtggaggttgcagtgagccgagattgcgccactaccttccctccagcctgggagacagagcaagactgtgtctcggaaaaaaaaaaaaaaaaagaatatcaaattgtacctaattcttctttctagttaggggaccttctgtagtactgtagaaagagtttgcattctggaatttgaagaccagattctagattcacttatctaattcactgtacccttatgggtcagtattaagttgtcctgccccatgccccactcccttctccttgctttcacgtgaatttagaactttggggatgattaggcaggtaacagactaatcagcataaagccagtccacctgaaacctctgcttaaaaccagttccacctgtttgcctaaaagtcaaactagtaattttaaaataaggcattttgcaccagttttcctaagaggcacttccaatgtaacatcactttttttttttttttttttgagatggagtctggctctgtcacccaggctggagtacagtggtgtgatctcggctcactgcaaccttcacatcctgtgttcaagcaattctcctgcctcaacctcccgagtagctgggattacaggcacctgccaccatacccagctaatttttgtattttcagtagagacggagtttcaccatgttggccatgctggtctcaaactcctgacctcaagtgatctgcctgcctcggcctcccaaagtgctgggattacaggtgtgagccaccgctcccagccgtaacattgcatttttaaatcactatcacaacttgcagcattttgtcaataatgagattgttttgtatgcttgtgggtgactttttctatttttctctcctattgatcatttttatgactttttagggagtttgtttgaagaccctttctttaaaattgtatatttctagcactaaatacttgtcaaatctataggatttcccacgagatttatcaaatgaacccattttgatccctcctctctgcttctcactgagttttgctctgtactgtgtattcctgtgtgcacctaatgggtttattaaccaaattagcatgtacccaatgttcccttctgttctgcaagatattggcattttgacaacaaacgtgaagtgatgagacagatggggcagaattatattgaactctttgcattttatttttcaggctatctcattcatcaagcaactctactttgtgaaacataaaatgatacaaacaaagtcattatcaaatgtatttattgctgaaaacataacatttttcaagaaaggcaaactggctaaaaagtcctgaaagtgttcaaaagtagataaaatagcagaagacacccaccaaggatacaaaacaatttttagtagcgatcctgcatttaatcagtatgttcttaaataaactgctttaaaaaaattcttcaaatgacactgccaaaaaaattaggacacccaaacagatgccagaaaacctgtaagtgggctggattttatgtgacctggtcattaagcatagggattcattttgtgagctcatggcaaatcagtttgaggccagttgacctagaaccgatttgggatgcaggcacttacctccctgcacgtgcaatatgtgggcatggggacacccatgacccccaggggaaaggaatgcccctcctgaacatgacctccaagagtaagggcgaactgtcagcttttaactgtttattataaagacatatttacacagaacaatctttacaaacattgaacacaggggaagggaacaatttcttaatgaacagggccttaatatctttgtataaattagtataagaatcataaacaaccactttaaataaggcagcccccctagcccacccactaccctcttctgttccctatctcccagctttcttagccatcccccactttctccccttccccacggggctgggcttggctgcaggtcatggcaggccgatgaggcaggagacacagaaaggaagggggaaagaaggcccaatccctgatgggggcgtcagtggcagaagagactttctgggcaccgaccagtccccactccaagcatgagcctttaagcagcagcagcagcagcagcagcgttagcagcagcataggtaaaggggcttgggggaggtggataggcaaacattggggctattgtgggacttggggggccctgactcccccgtccccacacacacaaagttgggcatcaggctcttgtcttctctttctccctcctgggaaccctgctcaagcaaaaggggagaaagccccctccaaggaatggctggtgatggcccctcacggaagctagggcctcccggggagagggtgctattcctgctgcacttcctcccatctttctttccttccttctgttcctttgctttcttttcttccctccttccttctgcccttcccttccttcttctcccctctccgcctcccccaaaggaaaagccctggaaggaaggtccggtcaacacgaagggaaggccatggagtccagtgattgaaggctacctcggactcctgaaaaccaccctggggttgagcggtagtctcagtgcctgagccgcccctattagagtaccctgggtctgggaatgctgccagttatgggggcagctggccagttatggaaccttccagcccagctgggggaatggtgcagcaggggtaggtcagggaggtgggagcagctccagccccacaacaggacagttcacagccagcttgcctctcccttcccttcccctcccagccacccccagccccagcctcgggaaaaggcacttcatttgctttgaaaagacatcatcaagagggaagagggcgtcataaagtaggagatgggagacctggtccccatcccggctctgcaatgactctgagcaggtcactcccctctccaggcttctgttttgcaggcgtttgcctaagaaggctaagtgaccttcaagggtcctgtcagctctaacattctgtgattcttggcaaaaacaacctcttgcttggcttttactcctgggagggtatatagccatgtcaggcccagcaccctcccctcctgacctggagcttgggctagctggggatggggtgtgggggcaggaagaagggagtattgggaggcacactaaggcaagagaagtgacaaaggacttcacgggcccctctctacctctcccttaactgagcaaacgctgatgctccacccacttcaccagagctcctgaaaaccaccctggcacttccatgcccccaatgtgccctgtctggatccccgcagccagcacctcttaactagagtctctccttgcttttctctgcattcttccctggaggccaggtgaggggtccaactgacaggaaaacaagggatctgctggagcccacagaagggagcacttccaccccgcgctcagggcagacatgaggaaggaaggcccaaatgaaggtttggggcgttagatgagacaggcagggactagggcggaggggacctggagaagaagggaggctttctggggctaggtctccaaagtcagtccagggaggggccaggaagatggactggacggattcttgtgagagaacgggaatcatccaaactacagccaggagcacgccactgggggaagcaggcaggtgagaagagctgggcccactggtggctacagcaggtgcgaggtgagagctgaatggacgtgaggcctccagagaagcagaccaatctatggaggagacataaccgccgggggtgggcacttgggggccccttcagtcctaaggagacaaaaatgacaagagagaagtcatggacatatcctaggccaaaggaactccccaggaaaggagaggagagaggagaccgccttctctttcccccaaactccactcagcccaaacctcaatcccaaggcccctgagttggtgcctgcctgtccccactgcagtgggacagccagcagaccagggaaggggcaggcttcagctctcctctctctgctgccaccttggttcttccctccttctcacagctccgggcaaccacagccacaactgtcctcttgttctctgcctgagagcccctagagctctctgcctccttccccaactctggcgacaatctacactggacatctgtaggtttgccctgggcacccctccccagccattaaggtccaccaggatgtctagaaatctctaagcaggccagcctccccaaccccaggcagcagggtggaagggagactggccccaagtatcaagcccctctctaggcctcagacgaggagatcgtctgtaaaataaaggggctagacagctgccccataagctctcttgccagctctaagcctctgtgagtgtggcgccaggactgtttgatggatgtgtctggccagtgatgagcggcaggatcacccggcttctaggctgtccttctccctccgctttagcactgtccactgaacagaggctcaagtacctgcttcagaaaggcatgggtcccttatgggagaggcggggccgctggcggcggaatttcctccgacctccctgccagggccctggcccattccttgaccctctgggctgcaccaggtggcggacattgccgtcttccagcccattcccatcgggaagcggcatcagggaccctgcaggaaggagaaagcctgttagtgaggaaggttgttggaaacgggcaggggctgcagaccacaggcccgcgggaggggtggtctgtccatgtggtggcacttctcatagattttctttgtttctttttttcatattgagggaaaatttgccatttctgcactgtcctgggacaaacggaacctactactcacatcttgccattgatgtagctgactttctgtccttttgacagttatatcatgtttctgacaggcacaagtgggttctttctttggaacgtcattggggggtgtgcactttgggttgtcacgcctgtacttggctggggggcaggaggcagtaatcaccacggcacccctgcaactggtacacttcaaacatttcagacatatgacattacaatgaccctcccaccgccatggacccatcacccagattcaacagttatccagatggagtcacatatgctttagttatcccttttctattttccttgactgcagtattttaaagcaaatcccgaacatcacgtcattgtactcctacatcctttgatatgcaggatgacccacttgtgagtactagggagctcatatctcgcccctgggtgtctcatcggtggttaggcatctctagggcgccaagtcctcccagtggatggggctgggccaggcgggttaagggggagaggtctctgactcagcctgcctcatgctgtgaccagatttagagacctgagaccagatttagagaccaataaatattgcatgaatatttgagaatgaataaatgaaacaatggtcaccttcagcagcatgtctgtgcaccaggaggggggtgggctgttgcagttggtacctccccaccaatgccctacctcctgaaattcccagatcacaccctgcatcctgtgtctcatgtaaattccttccatttcaatcccagctggcttctattctgcactctggggctcctctttacatctgtccacatctgtcaggaggcttagagtagaggcctcctgacaccagactgagccctgacaatggaatccaagtggtgcagggtatccttgggtgcagtgagggaaaaggcatgcaggccgactctcgtgaagcctgcagtccatgcagggaagctgagctgccacccccaagacaagcctggctggtggtggcaggcagtgtgtggagatgagatggtgctggggaagaggcagccaggcagggtacttgtgcaatgtccagtacaggcctgtgcagatacagcatctgaggccagagataatgaataacagtctctctccccctgcacaccatctgatttgcctgcatctagatccctgtccctcgagccccattgccatctacccaggaattcccaccacttgctcacagtttccatagagcctcccattggctgctcacaccccaatcatacccctggcagctcccccttcccctctgcctctgcctccaacatccccacgctctgttccttccttggctccttggtttttgtgagtcctcctctgcttgcacacaatttccaagtgttcagcctcctcttgggccaaaagtgggtgggtttggccttagggccctcttcccccaggcttctgagcctgcagttctccccactcacacccagacatacccaccccctccacacacacacacataaacacatattctccaagcctgcaccctccttccctctttccccaagaaaaattgccaggcccatgaggaccccgctgttgacttgggtcatttggttaactagccacacttccgtgccaacttatcccttaaattcataacctatgagaattaaaagaagaattatcttagcactttggagcagtaagtatggatggaacaagggggctgcttctgtctgactgtcatagagctaccctcttggcgccatctgtgagggggctggggctggagagggaaaggaaggaaagaccttcactaagctccccactgcagctgcttcagcctctgccttgagttctggggtccccacaaggctcaccctgatcactgagggcggatctgaatgatgctgataaggagcaggggaaggacctaggggccttgtgaagtgaaccaagtcaacacttggctctcacctctgcaccttcgactgctgggggtgcagaagggatggggcagtggtgcaggccattgtagctcagggtggtggcagacatggagaagagaagcatggtgccaggagggggagggcatcatctccaggtgctcagattgtgagtgtctggcagtcagaaagggagggctagaggccatatgtcaggatggggagcagggttggtggctctggccaggaagatgtctagactctaggtctgcagagaagaaccactctgagctgactgaacccccagccgggccctggagagcagccccaggcttcttgcatccctcccattgcgttggggactcattgtcctcagcatcaccgagatctgctggctcctcccgcactctgagcccgtcacccacctgtttcctacttttgattctgagtctggctcaccatcagataagctgacatctgaaaccctggctttatgctgtccaaaggaacaaattagaggctgttgattctcatcactgcagaagtcttgactgtaaaaaagaattcccctttagaaatggaggccagccctaatgcacttaaatattttcttccagctcatttgctacgtaaaaggaggctggagcaatcctccaaacaatctcgagcctagagagattggagccattgcctgctgaagtgccatcagccacgaagctacaacatctccacgctgagaaccacagtcagggggaggacaggatttgactttcatgctatctgaactccaaccctgccaatgcacaaagaggtacttgcgacttttcaggaacatgccagtctcatcaggaatgacgcacctgtttttcctctctcagtctggcctgtcttgtgatgactttaaaagcccaaacgtatgctccggtggggaccctgctggcaatgcccctccactgctctgtggtcctgcatgtgtctctttgtctgcccagccccccatcccagtcgccttctccagggccctgtgctgtctccagtgccagctttgctgccctgggatacatcatgctctgtctggtggccctctgcttcccttgccttagttctttgcgaggagaggcctggctcaggttacacgggtgcttagtgctgaggactggggatggagtagagatgcccttccctgagcaggaggggtacagtaggctctcctcacactcccactgtgactgcaggctttgagctgggcctgcggagggggaggagaaggggaaaaagaggggtgctcagagaccgagggacacttggccctggaccaggagttctcagactcacaagagcaaagtgtatcccaggtcaggaggcagtggaggagtgtacgtggtggtagcggggtgatgagaggcagcgtggagaggggtcgggggtggacatttcaagtcaggacagactgtggagaggaggaagtgtggttttcaggctggaactttgactggggactctggctggggacagcatgccagtccgggccaaggacaaagtggttctgggattcctgcttctaacccaggacaggagccagcgggagcaggacatgtgtacctggacccttggctggtggccacttccagggacatgcccttccttggctccaggagaagtcagggagtagagaagtcagtgagagccctgaaagtttccagcacgaggcttgagcaaaatgtgagggcaacgaatttatccaaatcacagtggacagatgacctaatgaagacgggggaattaaagcacgaagtggcaggctctggaccagccacatggtgttcgggcatcctggctgacttcccttcccttgaaaccagctctctcccctttgctagtactgtcccaatggctgggacccaggagggtctgagtggttgtctattggccaggggtctccccacagcctctggggggagcaccaagtgtgcagatccaggagccctaccttcctctggaacactctctgcacccagtcttcttcttccctgaaggcaccaccctggactatttgcctgtggtggtattgtgcaagtgtcatgccttgccaatgacaccagatggtaggctccctgaggataggctggtatggtgtatcattcgtatcttacattcgtatcttttgctccctctgttacctgcctgacaggagtttctgtggaaaaagcctacccacttcttactgtggtggtggctcacttcgtgttcaggtcttgaatagagaaatcaccggccagctacctggaggcaggaggtgccagccccaaccactgcacctttctgagaagccaggcagtgttcccagagccacagcagggccaaaaagcaagagcagagaaaggaggtggcctgcgatgagaggcaggcagagctggctgggcccctcggaggctcctgggctgcatgccatcctcctgttctggagggtttggaaccacttagggccctgtgcccttgccccaggaaactcactgccctgccttctccttctttctgctcccacctccctgtgactccagccatggtcctggcgttagtccacctggtcttggccttccccttgtgtggtgccaggcaggcagcaatgacagccagatcataggactgtggcagctggaggtgggagctggcagccccaggagacattgacacagaggacaggcagcctgggatggggctgctggggcgtggttggggaccaggctaggggcggacatgggcactagtgccaagtattggcaggtgagggcaaaaggactcccctttcctgagctgcagggaggggtcgggtcaggtgctgtgcttcctcctttggtgcctagcggcagggagactaaagtgaagcatgtccgtgcctgggacagaaaggaaggctggagccaggatgtaagagaaccaagtctctgggggtgggatggaggctatggggagggcatcctgtgcaggggaggagaccagccaggaccttggggttagggaggagaagaccagcccagcccggctgggcccggccctgcctgggggaggctgcctctgctcacacatgcaggccgaaaggagcaacagctgggctccatgccgccaccccctccgcgcactcctgcctatgcaacaagtgtcacgtctgcatgttggcacatcatccccggtttcccgcgcccctggactggcgggaggctcccagccttcagggaccagaagacgttcaacatgggagcccagcccactcgactctggtcagttccttccatcgatccacgagggagcgggcatgtcccccgcctccacctctaccacgcggggtgcagggcgtgggacacgcggcgcacacctgtggtcctgagctcctgggactgcgagcgacggttaggagggacaaggtgacgggcaggtgatgccaaaggccgagttgagccccgcaaaagaagcagtccttgtggccagccgccccatggctcggggcgctctgtcaatctgctgcctggcgctggccggcgcgtggctgctactgcacggctcgcgccgggctccccgggaggcggggagagtgcgaatagggcggagggaaaggagcacgccggctgcagcccgggcgagcgggagggcgcgcactcacctccacacaccgcggtcaaggagagccagagcagcaggagcgcctgcacgcagagccgcagattcatgctgctccttgggccgccgcggccccggcgagccggcgcgggggaggagaggtcgggcgcccggaggccaagaaaggcgcgagccgcggctggcgcgtgcgggcgcagagctcgggaggctccccggccgctgagtgtgcgcgctgagccccgccgctcccgctggccgcctccgctcttctgcagcctcctctcccgccgcggggcagcgccgcgaagctggcctcggcggctccgggagcggcagcggcgagctctttcttagcggctggctgctcggccgcggctgcaactgcccgtgaccccggctgccagagagaatgctccccgctcactccaggggctgcattttgtagcttgtggcttggccgcgagcccacttggtcatgtggtcatcgggagggctagagggggggcaggaagagggagagggagcgagcctcccgcaccgcccccctccaggcacgcactctgcagccccagcccgagcgtgagcgcgagagggaaccccgaggtggccccacaacaaaggctgcgcggcctctctgacaacctacaaccgctccccggacaatgcccgcctggccgggggccagagggtttgcagagacctgaaggatttcaaacacaggaagcatttggggcggtggaggggcacacttaaccctttctcaccttgcttccttaacagctgtcaggaaacctgggcgcttagggaaggactcagtctgggttgccttcactcacgccctctacctctgaccctggtccttgcccttgccgctggccagcttcaagggtttggtcaagacaaccaaacactggccctcctctctcctctgcattttcaactggctttgaattgggggtgactgcctaggcttgtgcccaaggcttgattaattgcccaggcccctcatgttccctgcatcccccaggaggcaccctctacctggaatgcccccaccccacccttccgtgagcaattcattctttgcagcagcacctcaaatcccatcgcatccagaagccttctcaggataacactaatccagcaggggccgcccatcagctcctccccactgttgggacatgggacagctcctatggtctaccctttcttgttccctggagctgtcctcattctagttccccatcaacgtaagaggcaggtggtttacccaactccacacagtcaaggctggattcattttgcgtgtacttgcgattccgctttagaagcgggtcctgaagttgtttgcctttccagactcgattgttagctgcttctatagcttgggagctcccaaggcatggggctgcttccctcattggactgggaaccccctaaggtaggatactgtcttctcactcttctggatctctccaaagtccccaatatcttgctctgcacataggtggcactcaacacatattaaaagactgaatcgaaaggtgtctccacctttcagcaagccaggcagtttgcttgaagtgttaagtccagatttacacaaaagatacattggacagggtgcgtgtgtgccataaaagacatgagagaccatggcatatttaaaatatctttgaaatgttgcaaaaatcctatatatacacaatgtatttattatcagtctctctccaccagaagggttacctccacaagggagggatctttgctttgttcacagctgtgtccccagacctagaacagtacctgcgacatgactggtactcaatacataattttgaatatataaatgaaattttcaaaaacatctttactgcctaaattcaggtagcaggaagggaataagataaggttctcattaatagcctatggcccattaaccacactcaagtaaaaaaaaaaagcatgtgaagcatggcacccctcttcatccttgagacccaggatatgagtagcagacatgggtagcaggagaccattctcccttcactgttcccctggaaagagtttgctttctttctcttttctttttctttttttcttttttctttctttcttcttttttttttttttttttttgagaccgagttttgctctgtcgctcaagctggagtgcaataccctatctcagctcactgcaacctccgcctcccaggttcaagcgattctcctgcctcagcctcctgagtagctgggattacaggcatgcgccaccatgcccgactaattttgtatttttagtagagacggggtttcaccaggttggtcaggctggtctcgaactcctgacctcagatgatccacccgcctcggcctcccaaagtgttgggattacaggcgttagccaccacgcctggatggaaagcattttctaaccaggaggagaaacacctggcttctagtctccaccctcatttgctgtagggccttgccatcatcacctaaacttactggggttcatggaggtgataatctctgctctacccacttcaaagttgttatgggattaagtgagataatgtgcctgaaggtaccgtgcaaattaagaataagctcttgcagggttgtttttaggaaacttggtgctccaatccttgattgggcaagcccatgcacacccaaataagtgtcccccataactaggttaatagaagccttcatatttaattgcacctttactagggtgtgtatggcatattgctaagtggttggaacacatagcgctttctaatacaatagccactaatcatatttccaatgaagtttaaaattcagttcctcagttccactggccacgcttcaattgcctatatgtggctagtggctactgtattggacagcacagaatagaatcttcaatcactgcagaaagttctattggttagagcattcattcattcttcttttttctataatccattttcccaccctacctagccttcaaaatgtacaaggtgaggggaaaaaaagcataaaagcaaaccaatagaaattcaagccaagctgaaggcatgcgtttagagtaagatttaaagatctgacacttgggagaatcattttttaattgaatccttctcttcatttaaccaaattacatccatttttttttagaggcagggtcttgctctgttaccctaggctgaagtgcagtagtgcaatcacagcccaatgcaggctcaaacttctaggctcaagtgatcctcccacctcagcctcccaagtagctgggactacagacatgcaccaccataccaggctaatttttaaatttatttatattttttgtagagactgagtcttactatgtttctcaggctggtcttaaactcctggtctcaagcaatcctcccatctcggcctcccaaagtgctgggattacaagtgtgagtcaccatgcctggccacatctgttttcgtagtcccagatccaagatttcatctttctttctcaggacacccttgcccacagtgactttgccctctccataacagctatggctgtacctgtcattggtaggtcctctcacagtgcatcaggaacacttttgcatctgcacactgtgctctacgggcctgctgtaattctgcagagaggacccatcaccaccatatccattcaggggtcaaggcccatgaggcaaggaacgcagctctgattgcccactctgaaccccttgtaggctcccagatatcttaatatcagattgaaatgaccagttttcgaatatctgtatctatttgccagactttaaggtcactgctgtgatagcacctagcacaatgcctggcacataattgatacttcataactgcctgtcaggtgagcaactgtcggcccaacactgtgctgtcttttgttcaggatactattgaatgaatatcagcaggataaatgttttaaggcataagtctccaatccctgggccatggaccactatggctccctgttctattaggaaccaggcctcacagcaggaggtgagcagcagatgggccagcgaagcatcatctgtatttacagccgctctccattgctcccattaccacctgagctccaccttctgtcagatcagcagtggcgttacattgtcataggagcacgaaccctattgtaaactgcatgtgtgagggatctaggttgcatgttctttatgagaatctaatgcctgatgatctgtcactgtctctcatcacccccagatgggaccatctagttgtaggaaaacaaactcagggctcccactgattctacattgtggtgagttgtagcattatttcattatatattacaaaaaaaaaatagaaataaagtgcacaataaatataatgcacttgagtcatcctgaaaccatccctcctaaccctagtccatggaaaagttgtctttcatgaaaccaatccctgatgccaaaaatgtggggaccactgtttcaaggtatttctctggagatgggaaggaggtacatgaaactgtccacactctcctgccctgaggcagcaagtagctgtaaaatttctggaaatgttgctgcatttggggctcaggacctgtggtcagcagcaagactcagtttccagtcaaggtgagggacaatcctgggggcaagggtaggactcagtgcattgttggggacagaagtgagatagctgacctatgtgagttcaaagtgtgacttgcccccctcatcagagctatccacatgctattcagttctgcttattgtcctatgtcaccaccagccactgctgttcagttgactcatccacgtctcttgtgggttaaagtgaacagtgtgaggcattaaaaagaactcagcttttggagtttcacataactgaattcaaatcctgcccctcaaccccattcgttagctgtgtgaccttgggcaagttattcagcttctctgaggctcagttttttcctctgttaaatgaggataataatggtacctaattttttaagtgctaaggtttgaatgtatgtgtccctccaaaattcatatgtttaatttttttgtttttgtttttggagatggagtttcactcttgttgcccaggctatagtgcaatggtacgatcttggctcaccgtaacctctgcctcccgggttcaagtgattcccctgcctcagcctccagagtagctgggattacacgcatgtgccaccacatccggctaattttttatatttttagtagagatggggtttctccatgttggtcaggctggtctcaaactcctgacctcaggtgatccccccgccttggcctcccaaagtgctgtgattacaggcgtgagccaccacgcctggcctcatatgttgaaattaaaagcccaaggtgatgtgttaagaggaagggccttttgagattgattaagtcatgagggttccaccctcatgaattaattagtgctcttataaaagaagttggaaggggcaccctagttccctttttgcccttctgtcccttatgtcatatgaggacacagtgtttgaacgctccagaggaagcagcattcaagacaccatctagtaagcacagactgggccctcatcagacacagaaactgccagcaccttgatctcagacttcccagcctccagaactgtaagaaataaatttggattatttataattatccagtctcgagtattctgttatagcaacaggaatggacaaagacattatggttgggagattaaatgagataatgtgtgtaaaatacttagcacagtcccctgctcattggatgttagttttctcctcttcctgacctgcttctccccccacctttgggtctatcctctggccttctgaaactgatcaggaagaaagggctctgatatggtttggatctgtgtccccaccaaatctcctgtagaattataatcccaagtgttggaggtggtgtctggtgggaggtgactggatcatgggggcagagttctcatgagactgggtaatttataaagaaaagagttttaattgactcacggttccacatggctggggaggcctcaggagacttgcaattatggtggaagccaaaggggaagccaggcacatcttacaaggcagcaggagaaagagagagggagggggaactgccaaacacttttaaaccatcagatcttatgagaactcactcactatcatgagaacagcatgggggaaacgaccccatgatcaaatcacctcccaccaggtccctccctcaacatgtggggattacaattcaagatgagatttgggtggggacacagaaccaaactatatcactgcctaacctcaaagcccacactctttcctcactgaacatcaagaagcagtttctcgggaggctgaggccggggaatggcgtgaacccaggaggcggagcttgcagtgagccgagatcgcgccactgcactccagactgggtgacagagtgagactctgtctccaaaaaaaaaaaagaagcagtttctcactttttgggtccacctatcactttatttgaacttctagcacctaactcatactgtcttgaattaggaagccatgaagtacatagtggttaagcacatgggttctagaataaggcagctctgtctcttactacataggtaactttgagcaaattattaacctttctgagccttaggtgcctcatcagaaaaaagggctagcacctagctcccattgttactgaaaggattaaaagaatcaatacctataaagtactcggcactgagtttggttcttatagtaagggaagcattgtgtaaatgttacatattcccatgggtatttgtatatatctctgacttatatgagatagtaacactatgtcttattcgtttttatattctcaccagcagtgctgttgcccaaagcaaatactcaataaatgtttgttgaatgaaagaaggaattgtatattcttgttaataattgctctaggtttatgatccatatcaagtgtctctatttgggcaaaatcatcacaacttgtccaactggttcttagatgggtcaacactaacagctaacagacatacacaaagatgtgaccatcttccctctcctcattgtgtagtagttgtttttactggatcaatgcaaaaagtggagtggggagaggacatctgaagaaggatgaccctggccagcaatcagagagatttcataacagcaagagccccaaccccctcattatgcagatggagaaactgaggtccagaaaggaaaagtgacttacccaaagctacacagaaagctggtggcaaagtcaggacggagcctaggttcaactaaatcccaactcctatttttccttctgtgtcttcccagcatagaagtagcgctcactggccaagcagtcccctagctggctgcataggcacaacaaaatgactgtggttaggcacaggattctcattccataggccagcgcttttggagcatctcagaatgagtcttcccattgtcactcatctaatttgttccttaagacataagctaaattaatgagcaaaagaagttcagtagcagcaacatcgggaaaaagtatttaagaagaacttcaaagcttaccctgcctctgaagctacttaacaggaacttgggggaaaaaagcatgggccagctgctagttgatgcctcactaactagcttcatgacaaattatctttgctcagttaaccaccacaagagaacatgaatttttcactctctcattactgagtatttgtctttctgatactaacggctagagttgagctttctaactcatctataaccaccagagcagccagcacaatgcttgccatagagtagtagatgcttaagccatattcatgggttcactttcccattctgggtgtgagaccatttaaatcagagacatgatgttcattatgtgaaacttagcctggaacttattctgtgaatcaaaagatcctaataatcattttgagggaataatctctttgttggactttgctggggtttcttcttcagctaactgtgtgattcttgtcttgatgtccaatacctcttaattctgatcaccagctaggtcctaagcctggccacagaccgagatcttgtctttcacacttgccctcttcccaagcacacagagtcaaatactaaccatcacacggtatcaggtttgcaaaaattagagaagtagccattttgcagcataaccacattatctctattcacatctcaagtgtttaatactatattcaagtcactacatgctaattccttccatgggacacctttcagccactgccacatgggctccaactgccctggaaatgcttattccatttctctgtttcttccaacttctttgcaaactacataccttctcagatcgtctgatatattcaaggaacaccaggggttcccacagatacgccttccttgacacaacacccaagttcctgaaaaatgttgtcagtggaattcagataatcagctatatttcaaatgtctttgaagggttcacagtttattagctgaataagtcctaagagagattctctgaggtgaagaactgttcctctgttcctgcccccagcccagcccagctccacagaattacccccttttccctacatcctgcttcattccttctgatcctctcccatagccacacaggtccccattcctcctgtttgtctttcagagcagtttcatttcctctgcatatcctctatgacgtctcccaggagcctccatccttcctctcccctacggtctataaataccctggtctcccaggggaggcatgtgaattccttccttacgcagcaaggccctgtgagttaggatagccactcccaaaggagcaggtttatctccaaagtccattgaacctttcttcctcttgctttgctggttaatattatctgggcttatatcatgtaagatattatatgtctcaaatctggcacctttgtttgcagagccagggcaaagactgttgaggacacggtattgagtctatgaccagttccgttatgggcttagagttctgggataataaggtcaaagtcagagagataatgaggtcagctttgttctatcccaaactcaagtttggattgacaccagtcactacctgaatcctaaccatggccacagactgagatcttttgaggttcttactttttgactttcatacatttcccatacacataaagagagagtcaaatattgtactaaaatttaaaaggtaacacttctggagaaaaaagaaagaaaactagccatcttacagcaaaactccatgtgttaatttctcagggctgctatgacagattaccacaaacttcgtggcttaaaacaacagtttatttcttctcacttctggaagccagaaatctgaaatcaagaaagctctagggtgagaagtttatgataaattagtgaagtgatagatgtgtaaattagtttgattgaatctttctacaatgtatgcatagatcaaaacctcacattgtaccctataaacatgcacaattatcatttgtcaattaaaaataaataaagataaaatgaaagtgtaagggaggattcttccttgcctctttcatcccctggtggctccaggcattctttgacttagggctgcatccctccaatctctgcctccatcttcatcttcacatgacctgacccttttgtctatgtgatatccttctgcctctctagggtctcactctgttgcccaggctggagtgcagtggtgtgatcatagctcaccataacctagaactcctggcctcaagcaatccccctggctcagcctcttcagtagctgtagctacaagcaccaccacaaccagctgattttttattttttattttttttgtaaagacgggtcttgccgtgttacccaggctgttctcaaactcctggcctcaagtgatcctcccactttgacctcccaaagtgcttggattataggcgtggctgcctcactcttataaagattgtcagcaatggatttagggcccacttggataatccagtatgtctctcttgagatccttaaacttcttacacctgcaaagaccatttttaaatgaggtgtcaaatttacaggttccaggggttaggacatagacatatcttttcgggggctactgttcaacccattacaccccactacctccatttacatttctggcatgctggaatcaacacagcatgaactttctgccaatttaacctccaaatatctgtcaaatctacacgtctctatgtttctgctgccctattcttgttccagccctgtcattcctcacacatcattctccatagcaaccagaatggttatgccagttggcttgaaaaccttctgtggctcatggctcttaggacaagaccaaactcttaaccatggcatgcaaggccctgcataatctagcccctacccacttcgccagcctcttctcttgcctcttatcctctttctatctgcaatgccatgtccctcctgtcacagtgccttcccaatactttttcctcctactgaatgattctctgctctaccctgtcttctcctggctaatgcctatcatcaatcagctcatctctaatgtcaaatcactcctcctcaagagatgttttccttggccctcagactggctgaaattcccctgtaatcgcttctcatagttcacaattcagtttgtgttcagttaatgtctggctcaccccatccacccctcactgtccaactagactgaactccataagggcaggggccatggctgtctggtttcatgactgtgtcctcagcatctagccagtgtctaactcatagtaggtgttcaatcattttcccaatcaatgcatatatgaatgaatgaatgaataggtctgaacatctgtgctttgctccctcaagttcttctaaaaaatgagaaaacaatgtttcactcccagggttgaataagaatcaaaacaagagaatgaaagggaaggagctttataaaccatgaaacgccttactaatttgaggaatcattacaatactggccaatgtaaccattcttctgggggagtgggaagtgcactgtgcacgacttaggggtagcaggaggaacaagggtggaggtggggaaggatacttgagttctacattcctctggataagaagaatttctgtggctctgctatgtaggataaaattacaagaacattcaattcccctgcttcaggcttgaagcttataactgatcaccctctgggatcaagaagaaaatgccattctgctcaggtgtaaatattgcccggagtcacctcgggtatttaggattttgactgtcttcctttaaagcatctgacccaggtgcaggctgaggatagggtgacagcctcctgggctggatccctcttggctggtgcttcccatgaggtgatccatcagccgtggcacttgcttaaggcactgcccagctgacaaacggctttgaagtgtgccttttggctttgcattcttccacttcctggccttcttggctttcactgttagcaggcaggcggaggggttggcggggctgggtgggggggcgggggaggtggtatcacctccttcctcttgctcctctagcacgtccatctaaaaaacatcccaggaggcttgacattccaggtctttagtttcttacatttgatttccctagaccccatcaagtcataatctccttcctgcagggaagggatacttccacctcttcctccatatcctcttagctccttgcatttgggtcaagagacctaaaaaggccatttcttatttccatcttgtcttccattgttttatcccctgggatatctctgcattcatggccctgagatgcctcactggtctggaatgctcagggcaagccgatcctctgaatcatagacaaagaaactggaaagaggagtgctcattaggctgtcatttccccagtttcctccactgacctggatgtctttccactggtttggtggtgtgcttccccactctgtcccactggattttgaggttcagtctacacagccccagagaggtgaataacaaaagcatgtctacgcataatccaagcaaaatcctcagttttgtctcaatgatttgggcatcccagtacaaaggactacttcagtagcaggctttgggataattttctctaatagttaccacagaattgaagctggaaaggaccttgaagtttatctgttcaaagacaccctccttttttgtttatagcgctatagaggtataattgacatacaatacctgcacaagtttcatgcagtgtacaaaagtgtacaatttgctaagcttttacatatacatactctcatgaaaccatcaccactatcaagttttcatcaatccctacagtttccttctgcctctttgtaaactctccatccagcccctcccctctgctccatctccaagcaatcacttggggataatgctttcaagcagtcacctggggatggaggagaggggaggggctggagggagggtttacttgttaatatatagtttgcattttctagaatttttaataaacagaataacacaatacgtactctgtttttgctggcttctttcacacagaaaaattattttgggatttattcctgctgttgtatgtattaacagtgttttgtgtatcagcaggtcattacttttgaatggctgagtggtttccaccatattttgtttattcattcatgtgttgatgcacatggatggttttttttttctagatgttggctattgccaataaaactgctatgaatattcatatacaagtctctgtatggacaaagactttcatttcccttgggaaaatacctaggagtggaatgctaagccatatggtagatgtctgtttaacttttataacactaccaaaccatttttcaaaatggtcataccatttaacattctcaccagtagtgtatgagaattccagttcctccatatcctcaccaacacttggtgtggtcagtcttttgtttgttttctttattgtggtgaaaggtatatataacaaaatttaccatttagacctttttaagaagacttcatttacatattttttaattgtaggtaattacacataacaaattttaactgttgttaagtttatattttgtcagcattaagtatattcacattgctctgcaaccattaccaccatccatctccacacctttttcacctttccaaactgaaacactgtacccattaaacattaactttccatttgcgccttccccagcccctggcaaccaccattctactttctgtctctatgactgtaactactctactacctcacataattggaatagtacttcagtcagtctttttaactttagccattcgaatagatctgtagtggtatctcactgtggttttaatttttatctccttaatggctaatgaggaaagcatctttatatgtgtttatttgccatccagatatcttatttggtgaattgtctgttcaaatatttagtccattttttattggttggttttcttagtattgaattattttaacaactttattgagatataattcacataccatacaattcaccagtttaaagtgtacaattcaatggtttttagtatagttacagagttgtgcaaccatcaccataatctaatattagaacatttttattatcccagaaggaaactccatatccattaccagtcacttcccattcccctacccttccatcccctggcaaccaataaccttctttctgtccctatagatttgccttttctgaacattcgtatgaatggagtcatacaatgttggccttttgtgtctggcttctttcactagcataatgctttcaaggttcatccatgttgtggcatgtatgagaaatttatccccttttactgccaaatcatatccaattgtttggatatgccacattttatctatccatttatcagttgatggatatttgggttgtttttatttttgactattatgaataatgctctatgaacatttgtgtacatatttttgtgtggatgtatgtcttcaattctctcaggaatatacctacaaatatgtacttgggccatatgacaactccatgtttaaccatttgaagaactgctaaactgttttccatagcaacagtaccactttccattcccaccagcaatgtatgagggttccaatttctctatatcctacccaaacacttatttctgtttttgtttttattatagccattctagtgtgtgtgaagaggtatttcattgtggttttgattttcatttcccttatgactaatgatgttttatgtgcttgttggtcttttgtgtatctttggagaaatgagcctttgcccactttttgattgggttgtctttttattgttgagttgtaagagttcattacatgttttggatactaggctcttatcagatatatgatttgtaattttttctcttattccatgggttgtcttttttctttttcactttcttaatagtgttctttgatgcacaaaagttcttcattttgatgaagtgaaatttatctgtattttccttggtgcttttggtgttatatctaagaaacaactaatctaagagcacacagatttatacctatgttctaagacttttatagtttgacctcacgtttaggtctatgctctattttgagtacatttttatgtgtgatgtaggaaaggagatcaacttcattgttttgcatgtggatatccacttgtcccagcaccatttgttgaaaagactattctttctctcattgaattgtaaacagtattgtttctaaatttcagtttccaattgtttgttgctagcatatagaaataaagttgacttatatatattaattttgtacccagaaaccttgctaatgtcatgtattagttctagtagatttcttgtagatccttctagattttctatatacatgatcatgttatctacaaataaagacagttttactgttttacttcttccttttttatctagatgcctcttatttcattttcttgcctcattgcactggctagaacttccagtaaaatatcgaataagggcagacattttttgtctatctcctgatcttagggggaaagaattcagtagtcaaccgttacatgttaactgtgggtttttcataatacacttcctcaagttgagattgtttccttctattcctagtttgttgagagtttttcttaaaaaggatgttggattttgtcaagtgctttttctgcatctactgagataatcctatggtttttttctctccttttgtttattaatgtggcaaattacattgcttgattttcaaatgttaagccgactttgccttgctgggataaaccccacttgatcgtgggtgtatcctcctatttctatattgttagatttgatttgctacaattttagcatagatgtttataagggatactgctctgtagttttctcataacatctttttccttttttattatcagggtaatgctagtaataaacatagctaaaatgaaaagggaaatatttcttccttttcaattttctggaacagtttgtataaaattggtattatttctgcttaaaatattttgtagaatttaccaataaagtcatctgaccctgaagttatatttgtagaaaggtttttagccacaaagtcattttttaaatagaaggctattcatagtgcctgttcttcctgagtgagtttaggtgttttgtgtctttcaaaaaattttccatttcatctaagttgtcaaatttactggcaaaaagttgttcataatattcccttagtattcttttaatatttggagaatctgtagttatgtcacccctgtcattcttcaaactggtaatttgtgtcttctttcttcttttcctgattagcctggctaaaaatatatcaattttattgattatctctaagaacttcagatgttctctaagaactttcaactctaagcttttggcttaattcgttttctctattgtttgtttcttttctatttctttaatttctgctttgatttttattattttctttcttctactttgggtttaatttctttatctctttctagtttcttttttttattattatactttaagttctagggtacatgtgtacacaacgtgcagatttgttacatatgtatacatgtgccatgttggtgtgctgcacccattaactcgtcatttacattaggtaatctcctaatgctatccctcccccctcccccaactccacgacaggccccagtgtgtgatgttccccaccctgtgtccaagtgttctcattggtcaattcccacctatgagtgagaacatgtggtgtttggttttccgtccttgcgatagtttgctcataaagatggtttccagcttcatccatgtccctataaaggacatgaactcatcattttttatggctgcatagtattccatggtgtatatgtgccacattttcttaatccagtctatcattgatggacatttgggttggttccaagtctttgctattgtgaatagtgccgcaataaacatacttgtgcatgtgtctttatagtagcatgatttataatcctttgggtatatacccagtaatgggatcgctgggtcaaatggtatttctagttctagatccttgaggaatcaccacactgtcttccacaatggttgaactagtttacactcccaccaacagtgtaaaaatattcctatttctccacatcctctccagcacctgttgtttcctgactttttaatgatcgccattctaactggtgtgagatggtatctcattgtggttttgatttgcatttctctgatggccagtgatgatgagctttttttcatgtgtctgctggctgcataaatgtcttcttttgagaagtgtctgttcatatcctttgcccactttttgatggggttgtttgattttttcttgtaaatttgtttaagttctttgtagattctggatattagccctttgtcagatgggtagattgcaaaaattttctcccattctgtaggttgcctgttcactctgatggtggtttcttttgctgtgcagaagctctttagtttaattagatcccatttgtcaattttggcttttgttgccattgcttttggtgttttagacgtgaagtccttgcccatgcctatgtcctgaatggtattgcctaggttttcttctagggtttttatggttttaggtctaacatttaagtctttaatccatcttgaattaatttttgtataaggtgtaaggaagggatccagtttcagctttctatgcatggctagccgtttttcccagcaccatttattaaatagggaatgctttccccatttcttgtttttgtcaggtttgtcaaagatcagatggttgtagatgggtgctattatttctgagggctctgttctgttccattgatctatatctctgttttggtaccagtaccatgctgttttggttactgtagccttgtagtatagtttgaagtcaggtagcatgatgcctccagctttgttctttttgcttaggattgtcttggcaatgcgggctcttttttggttctgaaaactaagataattgatttaggaactgtgatggttaattttatgtgtcaacttgactgggttaaggggtgcccagatagctggtaaacattatttctgggtgtgtctgtgaggatgtttccagaagagattaacattggaattgatagatggaataaagaagattgccctcaccagcacgagtgggcattatccaatcttttaagggcctgaatagaacaaaagggtggaggaagagcaaatatgctctctctgcttgagctggaatattcttcttcacttgctctcagacatcagtggtcctggttcttgggccctcgaactggaacttacaccatcggctcactcattctcaggcctttgggtttggactggaactacatggctggctttcctgggcctccagcttacagacagcagatcttgggacttcttagcctccataatcatgtgagccaatccctcataatgaacctctttttatatatctctatatctatctatctatctatctgtctgtctgtctgtctgtctatttatctatctatctctctgtctatctatctatctatctatctatctatctatctatctatctatctatctatctatcctattggttctgtttctctggagaaccctaactaattcaagagcattattgctttctaatataggcatttagtggcatcctatgaattctattatcttgtattttcattttcattcatttaaaaatacattctaattatctttttgacttcttctttgacttatggattatttagaagtgtgttatttagtttccagatatctaggcattttccagagatctttctgttattgatttctaatttaaattcattatagtcatagaatatactttgtatatactttactaacttgaattcttttaaatttgttgaaacttgttttatggcccagaatatggtctatcttggtaaatgtgctgtatgcttttggaaagaaagtatattcctctcttgttgggtggagtgctctataaatatcaattaggtcaagttggttgatagtgttattcatatcttctatattcttgctgatcttctctttgcttattctatcaattattgaaagatgggtcttgaaatctgcaatttctatttctacttgaagtactgtcagtttttacttcaggtattttgaagctctgttattgggtacataagcgtttagaaatgttatgtccccttgatgaattgaccctttcatcactatgaaattaacttctttacctctggaaattatttttgctttgaaatctactttatctcatattaatatggacatttcagatttcttttgattagtgttagcatggtataacttttttccatacttttaatctatttctaactttggagttaaaatgtttttcttataggcagtacatagttggctgttgcttttatatccaatctggaaatctcaatcctttatttgggtatttaagccatttacatttcatttaattattgatacacttaggtttaaatctattgttttgttatttgttttctatttgtcccatctattccttgttacatttttttttgtcttggggattaactgaatgttttttatgataccatttcatctcatttattggcttattagctatgactttttgtgctgtttagtgattacttttaggtttattataaacatctttaacttacacagtctaccttcaagtgatatgtaccacatcacatatactataaaaactttacaatagcatatacccatttctccccacaacctctgtgctattgtagtcatatattttacatttacatatgttacaaacctcacactacattgttattatttttgcctaaacaatccactatctattaaagatattcaaatactttttaaaaaatctgacctatttacctgtgtagttaattatttccagtgttcttctttcctttgtgtagattcatattttcatttattattcttcttccatttcttgtagcatgggtctcctagtgataaattatttgagctttcatataactgaaatgtttttatttggccttcatttttgaaagatatttttgcctgatacacaatccctggttaacagttttcttttttctttcagtgttgtaaagattttgcttcatcatcttctcacttatattgttcacaatgagaaatcttgtatttgtctctctgtatataatgtgtcttttttctctggttgcttttaagatattctccttatcactggttttgagcaatatgattacaatatgtctcgacataattttcttcatgtttcttgcacttggcatttgttgagtcccctgaatctgtgcgtttataattctcatcaaatttgaaaaaattttgaccattatttcttcaaacttttttctggtcccttttctttctttttctccatcagggattccaattacacatataagaggccatctgaatttttcctacagtttactgatgctcaattcattttgtaattctcttttctatgtgtgtttcatttcaaatcatttctatctctgtgtattcaagttcactaatgttttcttctgcaatgtctaatcttttattaattctatccaatgtgttttttacctcacatattgtggttgtcattaccataagtttgatttggctattttcaaaaatatcttccagccaggcacggtggctcacgcctgtaatcccagcactttgggaggccgagatgggtgaatcacgaggtcaggagatcgagaccatccgtaccgaaaatacaaaaaaattagccaggcatagtggcgggcacctgtagtcccagctatttgggaggctgaagcaggagaatggcgggaacctgggaggcagagcttgcagtgagccgagatggcgccactgcactccagactaggcgactgagcgagactctgtctcaaaaaaaaaaaaaaaaacttccatgtctccacctaactttttgaacacacagaatacagttagttgtaattaacttttttatcattgtctgctaattctaacatctgtgtcagttctggtttgatttcaattaattgatttatctccttcttattagtcacagtttcctgctctttccatgctagggaattttttacaggatgccagacattgtgtattctaccttgttggttgtttatatgtctaagtttctataatcagtggttcccatctaaaggcagttttgtttgtctgaagacattctttgttgttacaactggagggtgctattggtacccaatgggtacaggccaggtatgatggtaaacgtcctgcaatacacaagacagcccccacaataaagaattatgaagcccaaatatgtcaatcattctgaggttgggaaaccttgctgtaattattcttgagttttgttccgggactcagttaagtttgttggaaattgtttgatccttttggggctttctgttaagctttgttaaatgagaccagaagagtattaagtttggggctaatcatttcaccatactgaagcaagaaccttctgtgtactctacttgtcttagttcaatcaggttgctataacaaaataccaaaactgggtaacttataaacaacagaaatttatttctcacagttctggaagctgggagtttgaagccaggacaccatcatcatctagttcttgtgagggcccactttctggtttgcagattgctatcttcttgttgtaccttcagatgacagagagagagagaatgacagagagagagagaaaggaatgaagctctctcctatgtctccttctaagggcattaatctcataattggggctccatcgtagtgacctagtaacctcccaaaggccccacttcctaacactgtcaccttgggggttaggatttcaacatatgaatttggggggcgaggggtatataaagactcagactgcagcactacccaatactctaattttagctggttgagagcaggcactattcccagccctgtgtgaattctgagcactgttcttttaactatttgggatagttccttttcaaacattaaatagtttcctcacgtgagctagtgaatctacattgtgtttgttccatccccacttcactgctagtacccaacctcagaactttctaaagatgcttaacactcatcatatccactctcacccccaccccagacccactcctcctcctgtatctccagtaaatgttgccagtcccttaagttagaaactcaggagttgccctccactcctccctcctcatcaccccaatattcaatcagttatcaaatgctgtcaatttgaacttgccaatgtcccctgcaccctgtccttactttccagcctcactatccttgccttcttagaccatcatcatgtcctgctttggcccttcatgtggcaaccccaacttgcatctccaacatccccctccccctccactatacaccctcacttccagtgctacagaacctttcattgcttatgaagcaggccgtgccgtttcacaactctatgtctttgcacatgctattccctttgcctgaaatatagtttttctgttttctgcctggcaaattacttctcataccttagatgtcaccttctctgtcaagccctttttgatttctcgaggcacctattcacccctgccccttcgtgctcctgctatgttctgttcacactgtgttaacaacattggtcacatctgtttgcactgctgctttccccattgctatagctcctagggatctaacaatccctgtaggtgcttgctatggactgacttctgacaacttccaaaaaactcatatgctgaagccctaacccccaatatcactatacctggagataggctcttcagcaggtaattaaggtcaaatgaggtcataagggtggagccctaagcagacaggactgcagccttataagaagaagagatctttctctctcttcctccgccacgtgaagacatagcaagaaggcagccatcttacaagccaggaagagaaccctcaccagaacttcaccatgctggcacactgattttggacttccagccccaaaaagtgagaaaattaatttctattgttgaagtcacacagtctctggtatttttattatggcagccaggctgactactacagtgcttaatgcatggtgagtgcatttttaaatgaatggaaaaggaagaaagaaacagaagaggaagaggtggaacaaatggggagaaagatgaagaaagcagaagttaagaatgagagaaactaaggaaacaggaggaagaaggtagaggatgggaatgagctcatgaaggagccagtatctcagtggagaccatgccagtgtgagggaactactgccaactaggaggcaggtgggtgcaggctccagggccagtgctgagcatccaggcacaagacttttaagagagagtgtgtgtgtgtgtgtgtgtgtgtgtgtgtgtgtgtgtgtgtgtaattttttcccctagagatagcctagaggggccacctttgtgcttttctcagaggctatgtgtcctcattggctgggtaacagctgggtgcccttgcctccccggccaaaggcagccgccgtccacacccagctgcctgagggacaaggagggtgtttacccaatggcctgtgtccttaaaggactctgctctcagttacacagcaaacagctggcctcgaaggggcctcgtcctggccgccgcgagcgggcggcttctgcagcgtttaagcttctatctaccatgaagatgcttcccccaccctcatgcctcctcccgggggtgggcatgaggggcacttacgagctgagacctcacaggcgacattttttaagctgctcattctgacggaacagtccccaagacaaacacaaggctttctgtctcccagggcttgtgcgacttggtttcagactctgccacccactgccgcagacagcggccgtcttcccaggaagaagacatttcctggcggggtaccgggactgacgggcggcggcgcagggcagtgccagccgggcccaggaagtgaacgcgctgggcccgcgaaggagcgcgtcgcccgccctgaggggggcagtgcagcgcccaccgcgcgccttcgccagtcccctggcaccgttgccctggccaggggccgggagagggcgtggcagcgcggcagtgcgcctacgcaccgggggcactggggatcccgcccccacgctggttcccgcgctttcaagagcctcagagccccgagacaagggggtgtcggctctacccacctggcccagcccgaaagaacagggccaacattttgaaaccaaaccaataatagaattggaatacttttgatcactttttattttccttttctggaggagagttgtggggcgggggtggggagctggtagagagaatctcagggcgctgtggctttgagggcgggttccctgcgcaagcagcagtgctcacagtgcgagcaatcatggctaggcccagcccgcggttagttgggtgcagggacgtgacaggaccgcgagggctgattctttagtctattgttcccactcctcagaaaggactcctagcaaatatatactgctagtcccagctttcccgatggaatggaaccccttgctttgctttgctgtcgctattcaggatggggattttgtccatgcagaaagacatttacattatctacactggaatgccggcccactagcctggcaaaatgctgagccagctattagatctggactcgtggaggagtggagatttgcctccattcaagcaaccacatacttccctggaagctgggaggagcaccactaagtccaccctctcctgcctggctccttggtagtgcttctcaaacattatcacttggacaaatcacctgaggtccttgttaaaagtctgatttagaaaatctggggaatccggtggcacccgagactgcatttttaacaagctcccaggtgatgcagctactgctgtgcaccacaccttgagaagcaaggggtacaacattgctctcaactgcggctgcacattaaaattaacttggggagctttaagaactaattaggccaggacccccacccccaagatattctgatttagttggtctaggtagagtcaggccttttttttttttttttgacggggtctctctctgtcgcccctgctggagtggcgggatcatggttcactgcagtttcaaactcctgggcccaagctatcttcccacctcagcctcccaagtagctgggacaacaggcgcaagccaccatgcccagctaattttttttattttttgtagagacagggtctccctatgttgcccaggctggtctcgaactcctgggctcaagagagcctcctgcctcaacctcccaaagttccgggattacaagcgtgaggcagccaccatgcctgatctgggcttttttttttttttttttttttttaattaagctttttgggtgattataatgggcagcaggattgagagctaatggtacaagcagctatgaggaaggactttggctgttgccaggcctattgatttcatactgggcccaactgtagggtccagtttatgaccaagattaggaattcagtttgtgatcaaagaacataatttgtccatctggcttcaaacacttcatcttacctcacattcattcaatcatcaaatatttattgagtcactgtattgggcactgtgctagctactaaggattcagcagtgagtcagacagacatgggaaggtggtgacatgtttaagcaggcaggtgacatgatcagatttgcattttaaaatgatcagtctggctgcagagtgaacagattggaggggggccaagtggctgtgtacagaagcccttgcattaaaccaggggagaaatggcagtgtaggccagggtggtggcagggaggagcggaggaactcaagggctactgaagaggtgaaatcaacaggacttgataatagatttgacagggggaaatgtgagagagggggactgtcaaggataactgctaagtttcagatttaggcaactgaatgaatgggggcaccgcagagaaaaagaggcctggaagaggacagtatttggaaggaaggtcatatgtttggtccaagtggagctgtcaagtatgcagttggataagctgtctgaaacttagaggagagatctgagctacagatgtaaatttgggagccatgaggatagggggtgtgaatcaatcacctggataaagattgtagaatggcaaaaacaaacaaacaaaaaaacaacttagggtttgaagaactctatcatttactggcttgctcttccaaggtccctactattgggcaatgctaacctttccgcttcctaatcactgtcattttttaaatctcattcattaaagacttttggtaaaagagttcatggttttctcctcttccagaaaccctgacattctcatggatgacttctacattcatgcagacatcccttccaatgtcatgttctctctattctttgacttgctcatctttacctcctgcactcctcctcaagttacactctggcacagtcacaccttgggccttgacattgctttcagctgtgccactttaaaaatcactctttcaagcctccccgctctgctaccttctcatcttccagttttcttgtgtgattattcctgtgagaactgttcttcaactttattgggatggccagcccactgacccttctacttcttcccactctaccagctagctctctgctttcctgacttcattatctagcctaaagccttccgtttgtcaattcaataccaaagattggcagaggctgccatgctcccaacagatcctggataagaggtggggaggctgaggtcttctgcgagtgtgcagagggtattaaagttgtatgctgtggattaaaatttagatgtgggtgttctgggtgacataggaagaagaacctctattttgttttgaaagtgggcgtacctgcctttcattcttgcctggacaggccacagcccacctcaagctactaaagtgcctgggggccagaggcaacatgttccttaaagaagcagctgtgggtcagctcaagtgtttgggcaagtgttcagataaagctccagaatacagggtcttggagcataagaacatgatattagcctagactgttggaagggtaggtgtccctggtcatttaccgttagtgaccttagatctgatgtttgagtagcacggacttggggctagggctgaagctgggcccacattacagccagaggaaatagcagagataaagcaaaggaggtgggatgtgtacagcactcccagccaacagtgaacaatctaattggctggtacagggtgtctgggaaggagtttgagattccattgcccatccgcatcctacacttggccttttgccatttgagaaactaattaatagacacatattgtgatagagagtgagattgttggggattggagggtccccacccattccaggaatgactggaaagggtctgcactgaccgacttaggctcttcttggaagatgtcacgtattctaggagaattgtgaccaattgcaaccagacacactcttggtcctcttggtccttttttgtgtcatggaccctttagcaatctgttgaagcctttggtccccttttcagaataatatttttagatgcataaaatacaaaggatttaaatggaaaccaagtatagtgaaatatagctatcaactttttttttttttttgagatggggtctcactctgtctcccaggctggagtgctgtggcacaatcatagctcactgtaacctcaaactcctgggctcaagtgatcctctcacctaggcctcccaaagtgctgggattgtaggcatgagccactgcacccggtctccaacatattttttaaaatttgtgatgtctgtgcttcattattagcacattatataactaaatctagctgtgagtcttataactatcacaatttcaaagcaatgatgaacatattgctatttcaagagatgtgcttcattctaatgtgatatgaaaatatgtgtaatttctgctggtggccaagtcacaggtcctctaatactatggtggtttatcacctgcattcatgattgaaggaaatgctaaaatatagttaaaagatagcagaaacaaagatgtagttttccccatctaagttcatgaatcctctgaattccagccacagactacttagaggaacagggaccccaagttaaagatccacatagcttcctggtgttcctttgtggaaattccctttatcttagtccattggggctgctataacaaaggcctgcagactggttggcttataaacagtagacatttatttcttacagttctggaggctgggaagtcgaagatcaaggcactagcagatttggtgtccaacaagggcccagttccttcgtagatggcacctcctagctgtatcctcacaaggtggaagggccaagggtactctcttgggcctcttttataaggttactaataccattcatgagggctctgcccccatgacctaatcaccttccgaaggcccagcctcctaatatcatcatgttaggggttaggatatcaacatatgaatttgggaggacacaaaaactcagatcatagcaccttttgtctcaagtctccttgctggagggctcttttccaggatcatggttggcgatttggtttttagaaacaggctgaggcctggccttccctccactgcactcttagagcctgggttgtttgggtttctcttgtggcaggtagtactttccacctcaagtagggttcctctttcagctaatgtcaactgaacatctgctaagtacagggctctgtgctaagccctgggcataggaagttactccataaagagatagttatcagtaataataactcccatttaccaaacactttttacatgtcagacaccatgttgacacttcattcattcattcagcagagatttaccaagtgcctactatgtgccactgttctagaagctgtaggtagagcagagactaagacaaactcccagctcacatgaagcttacactctagtgggggaagacagatgatatacaaaataagtaagcaagtgagtgtgcaaaaataggataagtgctatggagaaaaacaaagcagagaaggaggagaaggaatgcccagagagatgaatgcaatgtccgattagttgaccagggaaggtctcccggaggaggtggacatttcagactaggcctgaatgatgccactgaagctttgcagatatttgaaggaagagcattctaggcagagaaaatagctaggcacggaccctgaggcaggaatgtgcttagctgtttgaggcatgtggaggaggcccgtggggctggagaagagtgagtgagagaaggagtggtaactacgagagcagagaggaaatgggggtgggggcggtgacagattgagcaggaccttggaggtcttatggtgaccttggctcttacccagagggagatgggaagcccattgaagggattgaacacagtccccacaacaatgctgttgcgtgatagtattagtattctcattttcaaatgaggaaacgacagctcagaaaagttgagtgacttggctggtgagtggcagagctgaaactggaccacagacctttctggaggtcacatgcctcctccctccaccagcccgaggctcggagtggggtcagcatgttctctactcccttctatttcctccagactgttgttcctttgtcatttccccaaggaccatacagtgctctctgtccaccattcttgctgtatccaccaacctctgctactggactatgagccctttacttactgagcacctgctatgtgccaggtactatgttagatcctgagcataaaatgatgaataagagaagtcagctccttgctctcctggagcttttattctagtggatgggaaacacaggtaggtcagaaaattttaaaaagctttctttttctttttttttttttagagacagggtctcactctgtcacacatgctggagtacagcagcgtgatcgtaactcactggactcaagttattctcccgcttcagcctcccaggcgtgtgccaccacacctagctttgtgtgtgtgtgtgtgtgtgtgtgtgtgtgtgtgtgtgtgtgtgtgtgtagagagagacggggtcttactatgttgcccagtctggtctaaaactgggctcaaatgatcctcctgcctcagcctcccaaagcactgggattataggcatgagccaccacaaccgccaaaaatctttagtaataagagccatgcagagaaaagagagtagctattttgtaaagaggtagggaaggcctctgtgaggaggtgacatttaaattgagatctggatcataagaaggaaccatctcagagggagagcattccaggcaggaggtatgagagcaaaggctcaaaggtggtcatgagtttggcctgttagaggaacaggaagaagatgcatggcaagggatgggaacatggcaggagatcaaggtagaaatgcaggggccagatcaggcagggccttctaggtcatgaacatatgggaatccactggagtgtttcaagcaggagaaggaaatgatctgattggtgttttaagatcatgctgacttccttatggagagtggattggtgggcagagggatggtggagaaaagtgtaaagattaaggatatgtttggtgatgaagtcaaccagatagcctgatagattagatgtcatggatgaggtaaagagaggaatcaaagatggcttctatgtgggggttgaacaactgcatggatggtgtctgttcaggctgctacatcaaaataccttagattgggtggctcataaacaacagaacttttttcttatagttcttgaatgtgagtcaaagatcaaggcaccagcagattcagtatctgatgagggctcaccctctacttcatagatggcaccttcttgctgtgtcttcacatggcagaaggggcaaacaagctccctgaggcctcttctgtatgggcactaatccccttcacctgggctgtctcctaaagtccccaccccttaataccactgcactagggattaggtttcaacatatgaattttgggaggagaaggggggccaacattcagaccataacagatggggatgccatttacagaactgaggaaggcattgggggagtgaatttggaggaaacgttgagttgttttgaacatgtcagtttgagatacctactaaacatccacatagtagtgtcaaatagacagttggatttatgagtctgcagttcttaagagtagtctaatctaaagatatagagtcagaaatattgtcattgtgcatacccacctaggccgagcacagtgcctggcatatagcagccagcctaaaatttgggtgggttggttgaatgaatgaatgaaattcttagagcttcagaatgagatagatcttggttcaaatttaaatcctggctctgctacttactaatttaaccttgaataaggtattaaacctttcagagcctcaatttcctcacctgcaaaatggagatagtgataatacttatcccatagggtggttgtaaggattatactaaataaaccatgtaaatcacccaaggtgcttagtacagtccctggtgcatagtaagcactcagtaaattggtggctgttacaatattcaaaatatgagataggccccaagaaagcaagccttggagagacactccagagggcagccccacagggtgggacaatgtagctcagctatatgtgtgaagcagtaatgcctagtgggtaggtgttgctcccttgagccaaactgtctgggtttataatcctgactcagccacttagtagcttacttaacctctatgtgcctcaggggggtttagaaattattattatttaatctctaaaatagggataataatagacctacctcatagggctgttgtgaaggattaagtgagataatccatgaaaaaggctgagaacagtgcctggttcatattaagggctcaatcaatgttaggagctattatcacagggatgtaggagggagggggatgcaaacaggcttcagctgtgcccttgacctccctccagagaagacagtattcagccctgccaggcagcagagcccgtttcatgcagctcttctctcccagcactctccttcctactcctccccggctgtggcctcccagtttttgcaactccctgaatagcttatgaacctttgccagggttggtgtggaaaaggccaactcctccagtagagagggctgcagaagctcagcctcccttcacactgggggaagtgttagccacaggctacaggcaaagggaatccagatccccaagctgcctgaagttatctagaagcagagagaaataaccaactgagacagtcccagagggccccccaagcttcttttccatttaaatgctctctttgttactaagaagcaaacctagcccatccccactggcaccagcctgcccattgtttccctaagagaccatcccaagccaagtgctggggctacctctcccttaaaggaatggcagcctggaggttgcactgcagtaagagcatcatataaccaaaattctccacaactaatggttctagaacaggacccaggtcaggtgtcatgggcagacccataaagggcccaatcactagagcatttgacctgcctcttccccccaggcttggctacctgtggtgattaatgctctgaggcctctgacatctgagcaatggacacaaggctagagcctaatcccacctacatttgatcaaaatggtaggccttgtgggtttgttccggaggtgagaaagcattaaatattccactggaaagacacaatggagagattgcgtaagtagacggttctttgggcagaagaagatggatggatctgaagtgggaagtgccagaagaaccctttctctaaccaggaggggcctctggtatccttgcagcttttagctctcagtgtgatcagtagactgtctgcttgacttacccaaactcccacttcccctcctgtcaggtatttgcttgggggctattcatctcctctgtgttcaccttccattcagctgaaaaagaggaagaggatttcccagctctgtcttcatccatgcattttttttttttgagacagagtcttgctttgttgccccggctggagtgcagtagcacgatctcggctcactgcaacctccacctcccaggttcaagagattctcctccatttcaccatgttggcctcaggtggtcctcccgccttggcctgccaaagtggtgggattacaggtgtgagccaccgtgcccagcccttattggagttttttttgtttggtttttgtttttgttttttgttttttgttttgttttgtttgagacggagtctcgctctgtcacccgggctggagtgcagtggtgccatctcagctcactgcaagctccgcctcccgggttcacgccattcttctgcctcagcctctcgagtagctgggactacaggtgcccaccactgcgcccggctagttttttgtatttttagtagagacggggtttcactgtggtctcgatctcctgacctcgtgatctgcccgcctcagcctcccaaagtgctgggattacaggcatgccttattggagttttatgagcatattctgtgatgttgaatgtctagtctataaatgattgcctagagaagacagggggcttaaggaacctttgaacgcccccactggttttggagaggtggtgagacttttggactcaaataatggctactgtgatgttaactgtgtttattgatttacagaagctacgaatggtgcagtgtacaaatcaccccgaaccttggtggcttaagacatcagcaatcatgttattacctctcatggtttctgtgggtaaggaactcaggaagggctcaggtggtagtcctggctccaggtccctcatcaggttgtaatcagggagtgactggagctaaaacagtatggggtgaggagaatggggctggagcagctggggacaggccagacacctctcacttcatgtggtctcggagatcttcacatgatctctccatgtgagtcggtttgggcttcctcacagcatggtagcagtcaaaccaatcacagggtggctcatggcttcaagtgtgattattccagcaagcaaagtggaagctgtatcctcttctacgacctcgccttggaagtcatctagcttcacttctgccatagtcacaaagctgcccagcttcagggagaaggaacatagaccctacatctcaatgggggagtgtcaaagtcatactgtaatacgctcatgcggaacagacgatactgtcacagcaattgtgggaaaatactccctactacaccaatcctacttcctgctcttccctcagctgaacctcagacaagccttttgctttcttgcttgcagctgtcagctggtccctcactctgggtgcccttctctcctctccagtgccttcaggccccaattggagtcccacctcttaaagtttccctaacggcttccataagcacaacaagcagcagttttcccttattcatagcaagcagacacttacatgtttgataggccaaagagttgctccacatttggtcagggccaatctgaccagtgggtaggtttccacatctgggccctaatacctggccaggtggaacatctagattctgaaacatcctcctcattcttccagggtctcagaacctcagggtgacatagcttctggccataaatgctaggacagagctatgttcattgtgcaatgtctcttccaaggtaggcacatgggcagatgaggctctgtgcagaaggccttggcagtcagatgagaggtggcagtaaaatgtgttggcaagagcctttggctgggaatcaggaagccagggtccccgaaccagctttctggctaatttgatgcattcatgatctgagacaaacctcccaatctccagttgacctcagtttccctacctctgcagtataaaacctagagcttgtccttcctacctgtgtggtgagcagacaagaagagagacagggctgggcatggtgactcacgcctgtaatcccagcactttgggaggccaaggtgggtggattacctgaggtcaggagttcaagaccagcctagccaacatggcgaaacccttccctacaaaaaaaatacaaaaattagctgggcgcggtggcagatgcctgtaatcccagctacttgggaggctgaggcaggagaatcactggaacccgggaagcagagattgcagtgagccgagattgcaccattgcactccagtctatgagacagagcaggactccgtctaaaaaaagaaaaaagaagagagacaggaagaacttctcaagagtagaacatgctaataattcttgtactgtatttgtttcttctctcagccgccacttcctctctagcatgtaggctccaaggtagtgggtgagtccgtaggcgcatgattatggaacagggatgggccaacagcctttccctatacacatacagtaggattcaggcaggggggtttggcaatgtggccattccccagttgctgaagggcttaccctgggtggatttggtgaggctgagcaaatggttaggcacagagctaacaattccaccctactctgctccaacacacaccccccgcccccattagaatgttctttattaggctactaattggctgtgtggcctcagggggattccttcccttctctggggcttagtttccattgaagaaagtgaacatatcaccacccctgcttctggagagaagcttgattatttcttgacccccatcatttctattgtgcaagggtggcatgtgatctctccagggctgggaagcattaagtcagaatagctgtcatcaaaacaatacatgctttcctcaaaataaagggggctcccgtaggcaccttcacctcttgggacttaaaggctggctgaggcagagtgtgggcccagaagttagcaaatctggacgtgtgaagtgaccttggctaagtcagagaatcccaaacgcgcagagctcaaaggcactgccaaaaacctcaagcccatcagctgtcagcctccagaataaatgtgtcccagatgacgttcacatggccacgtcagagtttggggcaattctccgtcagctgaaccttcatccctcttccttccactctggaaaacatatcacttctctcgacttctgagaagaacttgcacatgtgcacaaaggctggccaccgcagcactatttgtaatacagaaaactcagaacaacctaaacgtctcccaccagggggctgattcaatcaattatgggacagccatattacagaatgctgtgcagatatctttttatgtatgagacataaatgtgtggataaagttatccaagacatatttttattttattttaattggcaaataataattgtatttgtctatggagtacaatgtgatgttttgatgtacagctggccctacttattcgtgggttctacatccaaggattcaaccaagcttggatgaaaaatatttgggaaaaaataatggatgttgtgtctgtactgaacacgtacaggctttttttcttgtcaggattccctgaacaatataacaactatttacatgccacttacattgtattaggtgttatacacaatctagagatgatttgaaatataaggcaggatgtgcataggttatatgcgaatactatgccattttatatcagggacttgagcatcctcagattttggtacccgcaagcagtcttgggcccgctatatgtatacattgtacaaagattaaataaagttaattagcatatctatcacctcccatatttatcagttttttgtggtgaaaagcatattgttaagtggcaaaaaaaaaaaaaaaaaagctgtggggctgggcctggtggctcacgtctataatcccagcactttgggaggccgaggcaggcagatcacctgaggtcaggagttcgagagcagcctgaccaacatggcaaaaccctgtctctactaaaaatacaaaaattagccagtgtggtggctcgtgcgtgtagtcccagctactcggggaggctgaggcaggagaatctcttgaacccaagaggcagaggttgcagtgagccgagatcacgccactgcactccagcctgagcgacagagtgagactctgtctcaaaaaacaaaaacaaaaacaaaaaacaagctgtgggacaatatgtatgatacaatatatgtgataaaatgtacacaactatatatttctataggtactgtacatatacatgtaatgtatgcacggtatgcaactgcaaggacagaagtgtaggataccccaaaccctaacagtgttcacccccagtaaaggtactaaaatgagaaacgtgtcttaaggagttctttccaaataactaaatactttggatttttgccaacgtgagttgattcatcaatttattttctaattaaaaatgcactttcacagtaaagcatatgaaaaggggcacagaaacagattagtggctgccaagggttagggatggcttggagggaacaggtgggcatgggtgggtaggagtaacacgagggagtttattgatggtggtagttatgcaaaactatacacgcaatgaaactgcataaaactgtgcacacaaacatgcacacacaaatgggcgcatgaaaaagcttgagaaatctgaatcaggtctggagttcacttagtggcattgtactgatgttatatccctggccttgacattgtactatagttatgtaagatgttaccagcggggaaagctgcctgaagaggacatgggacctctctgtattatttttgcaacttctcgtgagtagttctttgaaaataaaaagtttactaaaaggggggcacaaaaagctttttgaatatttggaggtgatggaagtgtttcatatcttgaatgtggtagtggttacatgactgtttacctttgtttacctttgttaaatctcattgaacttgtacacatcaaagggtgaaattatgccttcataaacctgactttaaaaagtctcaggccagaactgctctcatttgttaagatgaagaaatcatttacaagcttgtgtgctttgttgtttatttcaaaattacatgcaacacacttcacaatgaccagtgatgcctgtgcccagtgggaggtccccgttagatgctcagccacctccagcgatgaggagcccatcacttaatattgcagcccatatcattgtcaggagaattgtaatagaaagttcttgattaggcctgtaatcccagcactttgggaggcctaggcggacggatcatttgaggtcaagagtttgaaaccagcctgcccaacatggcaaaaccccttctctactaaaaatacaaaaattagcagggcgtgttggtgcatgcctgtaattccagctactgggggtgctgaggcaccagaattgattgaacccaggaggcggaggttgcagtgagccaagatcacaccactgcactccagcctgggcaacagagtgagaccctgtctcaaaaaaaaaaaaaaaaaaaaagaaaagaaagaaagaaagaaaagaaaaaataaagttatttattaggctactagttagctgtgtggccttgggtagattacttcctgtctctgggccttaatttccttataagaaaagatgacctctgagatcccttctcgctctaacattctaagtctctaaaactgggaatttaagttttgacctggttttgccttctggagtcacacagaacttaaccctgtgtgttgccaacagtcagccagcccatcgtacactagaagtcagctagcagctcagctccctagggcaaacatcatcccctggcctttcccattgtcctaccaagaaatggaattgcaggatctggtgatggttaggatcacaggatcaggagtcaagcagcctggagtctgactgtggactttgccacttcccaccgtgtgaccttaggcaggtcacttgtgcaatcttcagtgtcctatctgtagaaagggaattagtagtaccagcctcctggggagagggcgtgggcattaaatgaggtaatgtgtgtaaatcaggatgtgtggtaggcaggataatggactccccaatatctgcacatcctaatccccacaacctgtgaatatattgtgttacagtggcaagaggaaattaaggctgctaatcagctgactttaaaatacggagatcagcggggcatggtggctcatgcctataatcccagcacttcgggaggccaaggcaggtggatcacttgaggccaggagttccagaccagcttggacaacatggcaaaaccttgtctctactaaaaatacaaaaaattagtcaggtgtggtggtatgcacctgtaatcccagctacccgggaggctgaggcaagagaattgctcgaacccaggaggcagaggctgaagtgagccgagatcacaccattgcactccagcctgggcaacagagcgaatctccatctcaaaataaaataaaatagagagattggggaataatgatcttggattatccagagaggcccaatatgatcacgagggtccctataagtgaaagacagaggcaggaaagtcagactcagaatgctgcaatgtgagaaagtctccaccagccattgctggctttgaagatggaaaggcatcgtgaggcaaagcatgcaggcagcctctcgaagctgaacaaggcagggaaacagatcctccccttgagcctctaggaggaacgcagacttgctgaccccttgattttagcccagtgggactcctgttgaacttctggcctacagaactgtaaaagagtacatttgtggtttggtttgtttgtggcgtcttttaggggattgtttagttttgttcttgtttttgtagagacagggtcttgctatgttgcccagacttgtcgcaaactcctggcctcaagtcatccttccacctcagccttccaagtagctaggactacaggcacacaccaccacgcctggctaattgtttttaaattgttctgtggaggtggggcacagtggctcacagctgtaatcccagcactttgggaggccaaagcgggcggatcacttgagcccaggagttcaagaccagcctggccaacatagcaaaaccctgtctctactgaaaaatacaaaaattagccgggcctggtggtgcatgcctgtagtccccactgctgaggaggctgaggcaggagaatcacttgaacccaggagtcagaggttgcagtaatctgagatcaggcgactgcactccagcctgggtgacagagcacgactctgtctcaaaaaaaaaattcttttgtggagatgaggtccttgctatgttgcccagactggtcatgaactcctgggttcgagtgatcctcctgcctcagcgtcccaaagctctgggattacaggcatgagccaccatgcctggcccatttgcgttgttttaagccactaaatgtgaggcaatgtgttgcagtggcaataggaaactagtacagatggctgctgctccctcctgactggtctccctgcacccacccttgcatctccccagtccatcccccacaacacagccaaagcaatgttcccaggaccttagtcaaactaagtcacatcccttaatacaactcgtctccctgtaccttaaatgtgcctcagggcctttgaacctgctgttctctttgtttaaaagatgtcatggtcgcctaagtaatacctaatctactttcataaactagctcaaagatgaaaatgctgcttcctcaaggaaggcttgaggaacccatctgggtcaggttctctaggtaatagcaccctgtcctcctctgtagcacttgtaggtttttaaataaatccatgtgttgatctgcttcagggcttattgcctgcctttgctaccaggcatgtaagcttcccaagggcagggacagtgtttgtcttattcacctcccttagcccagtcgctggcacaaaggaagcacttaataaatggtagctattatcattattttatttctgaatcctcatcattctgatcacctccccaaacactccctagtttgaagcgtcctttctgtaaagtggtactcctaccttggcccggtgctccaggggtggtatgaacaacaaaatgtagaagctgacagtgctgtccccacctactggggacataccacttctattcatgctgcttaaggctaccttcctttatcaccaacttcatcatactctcagctgcaacagagctggaggtcactcacacctacacacccacctgctgcaatcaggacgtctgccaagccagcttcccgccatcccgtttctgtatggttgctttttgtaacctcagtttcagctttactctcgttcctatggggtcccatcattttcttgggccattgttgtaacctgtcccaatctttccatgtccctattcagccagccattctattaaccaaccctcctggcctcgtgtcatctacaaaactgagcagtgcgcgtccctgtgcctgcttccgaatcctggccaacaatatggcgcaggacaaaggccaggagcaaggctcttgaaagtgctactggagagctcctgaggcccggtatccatctcagggggcagcagaggggggtgtttaatcagcaattcaaactgtgcctaggccaagttcttacgaggctgtgaaattgggaatgatattagtttcctagggttgccataagaaaataccaccaactgggtggcttaaaacaacagaaatatatttgcacgtatccctgtgtaacaaacctacacattctgcacttgtatcccggaacttaaagtaaaataaagaaaaacaaaataaaagaaagaaaaaaagaaaagaaatgtatttgctctgttattagaggctacaagtccaaaatcaaggtatcagcaggaaaatgctccctccaaaggctctcagagagaatccttccttgccccttccagctcctggtgactcctggtgttctttggctcgtgcagcatcactccaatctctgtcacgtggccttcctttctgtgcctgtctctctccgtcttcttataacgacacggatcattgaattgagggcccaccctactccagggtgaccttatcttacttaactaattacatctgcaaagatcttatgtcccaataagatcacaatgtgaattttggggtggacatgaatttgggggaaaacgctattcaacccactacaaatagccattctttctcacaggagcttcatgagggaccagaggataaggtagcacagggcagggcttctcaaactataagagccaagaagcacctggggatcgcattaaaatgcagatttggagccagccagcctggggtgggtctgcatttctcacaagctcccaggtgacatccttgctgcttgtcctgctttgaataacgaggatgtaagtgaaagaaagtgctttgaaaacaggtgtcaggtagggggattacatttcttttgtaatgagtttttctcacactcttatttccccacacctgaatcttgtgtgaactgtggaagaacagaaaaagtgttttcatttcagtcccctccaaaagcagacctggagacaaggacttgggttcaggtagtttattggggaggcggaaatagggaaagggagaaaagggagagaagccaatgaagtgccacattaaagagcaggttgcccttaaggcaactggagctccaacctgcgggggaccactgggaaactgtggggacactcctcagaactgtcctgtcaaagggctggggcatttgcccaccaattcccctcctccatcagttgaaagttacctgggagtgtcaactcctccacactctcccaagtgctgcagaaaaccctccctccagcagagaagttgcaggtgtccgaggtgggaaatagtggcatgctgcaaacagccctgtcccacagctaggtgacctcagctaggctgaagagatgggggagggaggggggtcgtcatcatctgctacaaaaagcttccaggatgtgcacgtcatctgtgtctctactattctattttgagtgcatgagtggctcaggcgagctcttgcttacagttgtgattatgactgtcatccagcaccagtggacaccttgctcataggggtgtcatggaagaatccgttgatggcctgctgaaacccacatgtgccccctctccgctaggcctgccttcccgttggtaaaatagtttatactatgggtgcatgtggaggagaacccaccccagagtaatgtaatcggtgcttcagggtcaccttaggaagaagatacttccctgtctcacagttcctaccttcacctagttcagttgatctgctcttgacattcagtgttacctttcatccacataacgatcctatgaggtagtggctatgattgtccccattatatagccaaggacactgaaggccagaaaaaccaatgtcacttatcgaaggtcactctgtaagtggcagaagtgggattcaatcacagtctttctgattcactagactctgtggattccataggaaaaactaggtggtaggtctcatgagatttaaatcacaaatctaactacacttctagggtgacctgctagatgagaacagcaagaactgcttttatttgtatgcagcttcttgtcctattagaacacagtgtgtccattagaagctgattctttacattaaaaaagaatttacaacaagtaaaatgtgtgtatgagtcagtgtgtatttactttttatgagtcagtgtgtatttactctgtgttggtatttactgggagggatggattcattgggatgaatggatttttcttagataattggtaaatgaatagatgccaactctaataagcaaaagatgccatggagaaatgaaataaattaattcaatgattcaatatcattagttttcaaaacgtcaccagaggatttcctcaactagggacttttcccagcacatcaaaggtaagattccactcccacaagcatgtcaggaacacacttatccacaaaatacgaaaaatccatcttcttctatatttggggccattttctctcccttactaagcagtgaacttcccgagggaaggaagggtgtaggttctttagacttccctacacattgtgtgggcagggccacaaggtgtgtacgcaaagaaatttcaacccctaaattcaggatgccagcacttgaatccacaaggctcttggagggggagggaaagagagtttttctacatttctttaattcttgatgctttgggggaggacacatttattgctcaccacggagaaccgagaaaagaagagcccccagtctccgccttgaaggagctgacagtccattggagaaacaagtggaacacgctggaaacaacccatgcatgatacaggagagctggggaagaagcggctctgactgtaagtgctgaaggggccaaggggcttgggaaagggagagatcagtgtggcctgagaggagaggaggtggaatgaaaagagcactgggctgggagtcaggagacctggcctctagaccagttccttgcctaattctctgtgtcatctgatgtgttcacttctctctctctctctctctctctctctctctctctcccccccctctctttagacggggtctctctctgttgcccagggctggagtgcagtggcggaatcttggctcactgcaatctctgccgcctgggctcaggtgatcctcccacctcagcctcctgagacactgggactataggtgcgcaccgccacacccagctaatttttgtatttttagtagaccctgggtttcaccatgttgcccaggctggtattgaactcctaaactcaaaccatccacccgcctcggcctcccaaagtgctgggatcacgggtgtgagccaccgcgcctggccatgttcacttctctcttacagatcaccctcaactatcttgcagtttagtaagatggtcagaactcctccagatgcatggcgatcccccaggagcaagaaggtccatttattcgcccaacatcttctgagcaccatatgtgccagccaccatgccaggcactgagaagcaaaagtcaaacagataagctgaaatagttgcaactccccacccagctactgtcacttttgcatctttgcttgtgttgtttcattcccctgcaccactctcctcattttgtccttctaggaaaactattgacccttcaaacccctggccaggaatcaccttgtttgtgaagacttctatcttaggacattcaggttaaacagaataccatagactgggtggcttaaacaaatatttatttctcacagttctggaggctggaagttcaaggtcagggcgccatcatggcctggttcttggtgaaggcctgcttcctggttcacaggtggccatcttcttgttgtaccgtcacgtgtctcttcttctagggggctctaatcccataatgggggctccactctcacaacctaatcacctcccagaggccccaccttaataccatcatcttgggagtcaggatttcaacatatgaattttggagagacacaaacattcagaccacgacaacttccccgagctcccgttctaccctcatgcccagcagagttacttcattcgtcctctgtgctcctgtcagtggacctgcatcagtgtccttactgtgctggactgagatggtctctggaaacccctggaggacagggaccaagacatatctttgtacctagtgctggcaaaaggcctggtccagagcagtggctccttcagtaaatgtttgtcaaatcacactgaaccaaatcaaactgaataggatcttcagctccatcagatttcaatttcatttgctttatggtcacctttgggaaaaagggagcttagaagcatttgctgactgtgacagagaggatgccgagagaggggctcggaggtgtttgatcaaatggaacattacagaagagtctataaatggagatcagggctctgctaccacccctacctcacgctccagttgacaacccaaactccagaggggcccatttaataagccaggaccaggcatcattggtgtggcaactgcaaagtttcactgggctggggatgcccatcatgctgcacatagctgtcctccctccccccagagttgtgcaaagcagcagacttgtaccacagatgagcagaggggtgaggctgatcagcccatggtgggatggcccttggcctccaccgtgtatctctcttgtacccagccccactatgggcagagggagaaggcagagaaaaataataaagagtaaatggcagagtctacacacttacatccctacttcatccttagtgaccttgtaaattggcacacagggtccaggggagagcatgtgtcacagctcagttccagctcagctatttccacccctggagcacagaaagctggggcaacatcctggggcacagagggcaacacagtctccatgttttggtcctacttttctgtgctgccttggaaatgaatcatatgtgactcttcccaaccagagaagttgtgaacaccacaggtctgccatctgtattcatccaggggcttgttggggtcagtgcagctgggataaggagaaggagcagaggagaaagccccagtggaggcctggcggcaaagaccgccccttaccatgagacaccataacactgtggccagagccggaggccagtgcaagagtgggaagaggggtccagactagaccctgctgcacactgttaatactccatccttccatgcagaaaggcccagggctgatgagttaaagcccgcaatgaggatggcaagcaggtgagtgacggagtggacacctggacaaacttctaagcaagtgtctttgcaagaaccttagcttttttctgggtacaatgttccatgtccactgccacctcagagtttaggccccagaggaggcccatgcataggattcaggctcaatctgaaacaggtctgggctcagcctcagtctgtggctggcagcccagtccagctcactgggcccgacgtggcctgcgtccatgtgcttggcttcattaacaccaagctctgaccaaccccagtgaccaacccctggcccagtctctaggaacagcttcagttaaaactttgtaagatgccagtaaatagcacagtaatgaaatccacagatgagctaaaactggactgttcagaatcagccaaggatgagatggagtctccagggggcccggcaggctagaaatatggtgaggaaataaccatgtgaaactcagcctgggaaggggccagcaaacgtcatgtgcatgctgccaaattctccccacagttagcaggaagcgggagggctgcggggagcagctgagctaagggagccagagaggcgggatgtggtaggggctcggagcgggtggccccagtccagtcatttgggagtgagtctgtagagacagtacagggaccaaagagcaggcccctgcccatgtgggcccagagaaactccaaggcaggccagcaggaccaaggagttccagggggtgcagagctttaggcgggacgggaagggtattatggatgagtcatgcatgggacagctttgtgtcaaggtaccaagatctctggtgctcacctgtccgctgtggagcccccagcaagcccagaaaatactagaggcagcaaaaacatcagtgatcaagtcagacagacccaggtccgactcctggccctgttctgaacctttaaactagttatctaactcccatcagcctcagtttcttccttccttccttccttctttctttctttccttccttcctttctctatctctctctctctctcttcttatttctttctctctttctttctttcttctcactctgtcacccaggctggagtgcagtggtgccatctcaactccctgcaacctctgcctcccgggttcaagcgattctcctgtctcagcctcccaagtagttgggattacagatgcccactaccatgcccagctaaattttgtattttttttttttagtagagataggatttcgccatgttggccaggctggtgtggacctcctaacctcaggcgatccacctccctcggcctcccaaagtgctggaattacaggcatgagccactgcgcccagcctagcctcagtttcttcatctgtaagacaaaatgttagactttcttcatatggtgtcctgaggacaaaataagataatgcttatgaagcaataagcataattgttagcacacagcatcagccaagagaaggaggaggaggaaaccaatgacccctggtgctgctggagccttgtgtccttccttgtcccttcccctcagagcctgacctccttggggctacaaaccaacctatcctctcttcagctggaaaataactgtcccctcgaaacactactctctgccaatgcctcattaacgaggcattgccactttaatagccaatcatggtcgactcttttactccatccataactcttgcatgagtggagagagcctttacctacaacaaaaatgttgaactttgagcttttcctcaaagatttataaaacaagtcctaatgtgttatttgtaatagactacatctcaacatcgaggctggttaactttggttgttgtagcccagtgagggcccacactatggattccatctgtgtggactactttccttcattctagccctacccatggcctcaaccataattgaacccaaaccttggcctcagcttgagcccccaagctctaatctgcctgcctcagatgaaatgtgaaaggctcaggccaaactcatccccaccgtagggaaaacaacctaaagacatctcatggcaatgacactggcttattggttccttctctctcaattatgagcactcggtgaaactgaagttgcatagaatagactcccccaaggaatgggagacccttggaacctgccctttaggaatttgtcatctcaagttggtaatgacaacagctaggaatccaagggcaagccacaaatgatacgatgttctctcttgttggatcaatactaaaggacctgaggggcctgctgccatggtgaggaggagccttcaggggtacccaggctggactggatgcagggagtaggctgctgctctctcatagatccaagaagtgtttgagcaccaagtctttctcctccttcaatgcccttgagttacaccaacctccagcaagagtttgacccactggtaagattcatttcctgggaacttggcccagaccccagcagagagcctggccttcatctaggctgttgttttccatgagcagttcttgtctgatactaggaagcgtcctgttggattttccaggccagctccactttcccgcatcttgtgccttagtaagaccttgtgtccagaattctggttcagaacatgtgttctgtataaataggaagcctagaaaggaaatatgtagccagctcttatcacctccatcatgtcaatgtcccctcaacacaaaggccttctctggccagctctagctggctatgttcttgctattaactttcttttaactgggtccttatgtctagctacttcacagagtaaatcctagctccccatcttctgcctaaggggctgtgtctccccatcaggctgagagttctcatgggcagggcctatcctttccgcctttttgtgttcctgtgaacaaggctcttgcacccaatggacacttttatttattcattcatccaacacgtatttgctggccgcctgctatgtgccagtctctgagttaggacattgcagtgaaaaatcaaagttccagccctcacgaacctctcattttagtggaaggcaaaggggaaggcctagaagggaaagccaagaggaggcacttgttcaaccatcaagtcttgggcacccactgtgtcccaggctttagactaggtcctagaggcacaatgccacagcagagccacttggtcaggaggagccaccagccaggccagagttctggccaccctcccagaggaaatgtttccccccaggatcctggctgaaggtggtgccactggccctggccagctgcctactaccatccccatcccttcacccttttctccaccacaagcagcacagttggctgtgctgtggagagtcgttcatcagtacatccacaaggagccacattggtgtttccttgaaagccaaggagaagaggtggttcccagctcagccttggagagaggcagcagcatccttcctttaagggttattgttaacatctccattgcctgcactgaccaactgaccagtgggggagtcaaagcccttggtccctccccagctgctcccacaaccttcttgctccaagtggacagtccagcaaggcaggtttctgggagccagggccctactgtggaactggaggaagcccaggaagattgtctggcctggggtttggctgaaaggagagaaacaattgccttgagaacaaaataccagaactgaggactgatcccaagcaagatggcaagatagtgatcccaggaggctgaagggatcatgaggtgagcatggaattgtgctgctcagatctccctccaacagaaacttctgcaggtagcagaattaactgacagtcccagctgccacacttttggatctacggtggtgttcactataggctgctcccagccaatgactaagtccggcagggataccagttccagcccattcctgcctgacatgggactcctccaacaggcaacccttgctccgggatctcccatcaatctggccagactttctcagagctgcactgcagcccaagactcttcctactccagcctcctcccttgcacctctcctttctcaagtgtcagtcccacactgtggtctgaaggtgctccctccttgctcctgcttccatcttttatcctttgcagatccccaccccttccccaccacataaaggtttaatcccatctgatgtctacttctcagaggacccaagctgacctaggaagcaaagatcccgtggatcaggatgagcaggctaacggatatgtgtgccccctgcagccccaaaggaccactacccactgccagagaacattgttttcccaggtctgtgggaggagctgagtgtgggctcctttccagtggcctagaaggggtcccagcctcacatggctcatatcctgctgagaacctgcaccaaccctcccttcaactcaggggtctccattttcctcaagcagaaagcagtcttagaaaattctcccccaacatttccaaatatttattcattttaattaaaaaaaaagaaatccaaatgtacctcaatttacccaagaactgtgtccttgagatgttaagtgcaaattaaattggggggaagtagatcttcttgtacatgctccatgggcctcgcaattaaagggagctctgcagcacatcaaacgtcagttcccatgccatgtatctgagttgacaataaaactgatgactatgggtaaatgacagtaaaactggttaactgtacagaagtcaagcaaacggcaaccacagcaggtccctggccctggggatctcccagcccaccagagagaccgacaggatctacttggagaacaaattcaatcagaccttgatggtgacagcattgctcattcactagctctgagaagcaggaaagagtttagacaagaataaccagggatgccactgaaggtgggtgcccaggcctgggctccaggcctccctaccactactacacagagctaccctcttcctgcctttccctgtctgtcccagttgctctagggtcctcctagtctgtgccctgggcctggccacatggttggctgcctggggaggccctggctttgttcccagtaccagaggttggggtgaagacatgcgggctgactggagtgtggccagccctcaggcccagctgcagggcgcagggccaagttgacaatgccagccactggagacagagtggcaactactgctgtcgcctccaaaataccagttgaggttttctcctactgtggggtttagaaactatttccatttctattatgcctttgttttgccctattttctcttttctttttaatagtgttggtggttgtgcctggaggtgagacaggggagggcaggacaagagccaagagaacgctgaagtcagcagagtgtgctctggtgcctcgcagcttctcttccagcactgcccactcccactgcagggcctgggtctcaatggcagtccctctcagggcctattctccatggacaagaatcagcagggctcttactccaccctatttttccccgatcatgacttcctgtaccgtggcccactcttagcatccatctgtctgctggtaaatgaggatattcactctgtcctgggccaccttctcctctcattgcacactgtcttcctagacagtcccacccacacccatggcctcagttaccacttacatgccataaactccacatttatttctccagccccttctcccctctgattcttagacctgcatatccagctgctctctctcccttagtggctcacaggcacctcaaactccacatggccagaactgacctcatcatcaccactctacccagccaccaaataaacacacccctcccaaaagagaaaagtatcttctcctgcttcagtcttctccatctcagtgaatggcagtaccatccttctagctgttcaagacagaaaactgggggcgatcctgaactctgccctttacttcacccatcagctatatcccatctatcagcaggtcttgtcaatcccatcttctatagagctctccatggttttgatagctccctagtcccattgtcactcttttaattaagacctccatcaactcattcatagacaacttaaattacctcttaatttgtctttctgcctcagtatttacctcttgtccagttaagagaccaccaggtggccaccagattttccttagaaacagatatgatc

SEQ ID NO: 244 - DNA, 3166 bp, Homo sapiens
aagagctccagagagaagtcgaggaagagagagacggggtcagagagagcgcgcgggcgtgcgagcagcgaaagcgacaggggcaaagtgagtgacctgcttttgggggtgaccgccggagcgcggcgtgagccctcccccttgggatcccgcagctgaccagtcgcgctgacggacagacagacagacaccgcccccagccccagttaccacctcctccccggccggcggcggacagtggacgcggcggcgagccgcgggcaggggccggagcccgcccccggaggcggggtggagggggtcggagctcgcggcgtcgcactgaaacttttcgtccaacttctgggctgttctcgcttcggaggagccgtggtccgcgcgggggaagccgagccgagcggagccgcgagaagtgctagctcgggccgggaggagccgcagccggaggagggggaggaggaagaagagaaggaagaggagagggggccgcagtggcgactcggcgctcggaagccgggctcatggacgggtgaggcggcggtgtgcgcagacagtgctccagcgcgcgcgctccccagccctggcccggcctcgggccgggaggaagagtagctcgccgaggcgccgaggagagcgggccgccccacagcccgagccggagagggacgcgagccgcgcgccccggtcgggcctccgaaaccatgaactttctgctgtcttgggtgcattggagccttgccttgctgctctacctccaccatgccaagtggtcccaggctgcacccatggcagaaggaggagggcagaatcatcacgaagtggtgaagttcatggatgtctatcagcgcagctactgccatccaatcgagaccctggtggacatcttccaggagtaccctgatgagatcgagtacatcttcaagccatcctgtgtgcccctgatgcgatgcgggggctgctccaatgacgagggcctggagtgtgtgcccactgaggagtccaacatcaccatgcagattatgcggatcaaacctcaccaaggccagcacataggagagatgagcttcctacagcacaacaaatgtgaatgcagaccaaagaaagatagagcaagacaagaaaatccctgtgggccttgctcagagcggagaaagcatttgtttgtacaagatccgcagacgtgtaaatgttcctgcaaaaacacacactcgcgttgcaaggcgaggcagcttgagttaaacgaacgtacttgcagatgtgacaagccgaggcggtgagccgggcaggaggaaggagcctccctcagggtttcgggaaccagatctctctccaggaaagactgatacagaacgatcgatacagaaaccacgctgccgccaccacaccatcaccatcgacagaacagtccttaatccagaaacctgaaatgaaggaagaggagactctgcgcagagcactttgggtccggagggcgagactccggcggaagcattcccgggcgggtgacccagcacggtccctcttggaattggattcgccattttatttttcttgctgctaaatcaccgagcccggaagattagagagttttatttctgggattcctgtagacacacccacccacatacatacatttatatatatatatattatatatatataaaaataaatatctctattttatatatataaaatatatatattctttttttaaattaacagtgctaatgttattggtgtcttcactggatgtatttgactgctgtggacttgagttgggaggggaatgttcccactcagatcctgacagggaagaggaggagatgagagactctggcatgatcttttttttgtcccacttggtggggccagggtcctctcccctgcccaagaatgtgcaaggccagggcatgggggcaaatatgacccagttttgggaacaccgacaaacccagccctggcgctgagcctctctaccccaggtcagacggacagaaagacaaatcacaggttccgggatgaggacaccggctctgaccaggagtttggggagcttcaggacattgctgtgctttggggattccctccacatgctgcacgcgcatctcgcccccaggggcactgcctggaagattcaggagcctgggcggccttcgcttactctcacctgcttctgagttgcccaggaggccactggcagatgtcccggcgaagagaagagacacattgttggaagaagcagcccatgacagcgccccttcctgggactcgccctcatcctcttcctgctccccttcctggggtgcagcctaaaaggacctatgtcctcacaccattgaaaccactagttctgtccccccaggaaacctggttgtgtgtgtgtgagtggttgaccttcctccatcccctggtccttcccttcccttcccgaggcacagagagacagggcaggatccacgtgcccattgtggaggcagagaaaagagaaagtgttttatatacggtacttatttaatatccctttttaattagaaattagaacagttaatttaattaaagagtagggttttttttcagtattcttggttaatatttaatttcaactatttatgagatgtatcttttgctctctcttgctctcttatttgtaccggtttttgtatataaaattcatgtttccaatctctctctccctgatcggtgacagtcactagcttatcttgaacagatatttaattttgctaacactcagctctgccctccccgatcccctggctccccagcacacattcctttgaaagagggtttcaatatacatctacatactatatatatattgggcaacttgtatttgtgtgtatatatatatatatatgtttatgtatatatgtgatcctgaaaaaataaacatcgctattctgttttttatatgttcaaaccaaacaagaaaaaatagagaattctacatactaaatctctctccttttttaattttaatatttgttatcatttatttattggtgctactgtttatccgtaataattgtggggaaaagatattaacatcacgtctttgtctctagtgcagtttttcgagatattccgtagtacatatttatttttaaacaacgacaaagaaatacagatatatcttaaaaaaaaaaaa

SEQ ID NO: 245 - DNA, 2194 bp, Homo sapiens
ataaaaacattgtatatagtagaccaaatggtcatagttactgtgagcctggcagagcagaaaaggcagttgaaggaggcagagaaggggttggtgatacggtgctataaatctgtggtccagtccacctcccttttaagacgtcctccccctatttctgttcttagttagagatgcagcagcttactcctgtagcgacctactaaaaagcaacaaggagaaagacatcgtctttttgaaaaaacgttctttcgtctcttttctttgttccttggtttgtttttcttgcccctttttgtttagttgaacggcaataggagggtagtctctccgtctttttaaactcttttttaagtttcccctcccctttcatatttttttgggccatttcttttagctttggactttgggggtcgaaagcgtttctttttatttgcttcttttaagccgagcacagtttaggtttcgtgctgtcttaagagaactatccagcagcttcttgctcatccttattgggagaactgcaccgttactttaaaaacacacatacacaaaaaccttaagggagaaaggtaattgctgccatggaaacacaactgtctaatgggccaacttgcaataacacagccaatggtccaaccaccataaacaacaactgttcgtcaccagttgactctgggaacacagaagacagcaagaccaacttaatagtcaactaccttcctcagaacatgacacaggaggaactaaagagtctctttgggagcattggtgaaatagagtcctgtaagcttgtaagagacaaaataacagggcagagcttgggatatggctttgtgaactacattgaccccaaggatgcagagaaagctatcaacaccctgaatggattgagacttcaaaccaaaacaataaaagtttcctatgctcgcccaagttcagcttctatcagagatgcaaatttatatgtcagcggacttccaaaaacaatgacccagaaggagttggaacagcttttttcacaatatggacgcattattacttctcgtattcttgtcgaccaggtcactggcatatcaaggggtgtagggtttattcgatttgacaagcgaattgaggcagaagaagctatcaaaggcctaaatggccagaaacctcccggtgccacggagccaatcactgtaaagtttgctaataacccaagccaaaaaaccaatcaggccatcctttcccagctgtaccagtctccaaacagaaggtatccaggaccgctagctcagcaggcacagcgttttaggttttctccaatgaccattgacggaatgaccagtttggctggaattaatatccctgggcaccctggaacagggtggtgtatatttgtgtacaacctggctcctgacgcagatgagagtatcctgtggcaaatgtttgggccttttggagctgtcaccaatgtgaaggtcatccgtgactttaacaccaataaatgcaaaggttttggatttgtgactatgacaaactatgatgaggctgccatggcgatacgtagcctcaatggataccgtctgggagacagagtactgcaggtctcctttaagacaaacaaaacgcacaaagcctaatgagctcttgtcctcagtccatttatatatgaaaactatacaacaaaggcaagttaagagaaactttatacattagtaaatgtctttgtaagtcagtgttgagatggggataaaatgactacttagcatcctaagaaatatgtgagattttttattgctagtatttgaattaaaacttcttaaatatcttttatgttgaatatggacaagaggtacagggttttacctgtcacattgcattctattgccttctttgaagaaggtggaccttttaaagtgtttcagctaagggaagacatttcttttctttttacataactgccttgaacctgtgagtaaatattgaggctttgtgttgtaattcttcagttggttgtgtcttttttttcccccctttttcctttttctgattagctttgtgtttggtttacatttaaagcattgctgttatgtctgtttaagaaaagtattttgaagtttacatttttatttatgaagtttaaaacagtatttattttgtaattatgatttgggttggggaagggggggctacattataaacgcttagg

SEQ ID NO: 246 - DNA, 2131 bp, Homo sapiens
ccgccgccatccgccctctctacccccccatccccaggtgaggggggtgagttcaggaagcggagaccccgaggaacccagcagggtcaccatttgcagcgcaacatggcaggagctggaggagggaatgatattcagtggtgtttttctcaggtgaaaggagcagtagatgatgatgtagcagaagcagatataatttctacagtagaatttaatcattctggagaattactagcaacaggagataaaggtggtagagttgtcatctttcaacaggagcaggagaacaaaatccagtctcatagcagaggagaatataatgtttacagcaccttccagagccatgaaccagagtttgactacttgaaaagtttagaaatagaagaaaagatcaataaaattaggtggttaccccagaaaaatgctgctcagtttttattgtctaccaatgataaaacaataaaattatggaaaatcagtgaaagggacaaaagaccagaagggtataacttgaaagaggaggatggaaggtatagagatcctactacagttactacactacgagtgccagtctttaggcctatggatctaatggttgaggccagtccacgaagaatatttgccaatgctcatacatatcacatcaactcaatttctattaatagtgattatgaaacatatttatctgcagatgatttgcggattaatctttggcatctggaaattacagacaggagttttaacattgtggatatcaagcctgccaatatggaagagctaacagaggtgattacagcagcagaatttcatccaaacagctgtaacacatttgtatacagcagcagtaaaggaactattcggctatgtgacatgagggcatctgccctctgtgatagacattctaaattgtttgaagaacctgaagatcccagtaacaggtcatttttttccgaaatcatctcctctatttcggatgtaaaattcagccatagtggtcgatatatgatgactagagactatttgtcagtcaaaatttgggacttaaatatggaaaacaggcctgtggaaacataccaggtgcatgaatacctcagaagtaaactctgttcactgtatgaaaatgactgcatatttgacaaatttgaatgttgttggaatggatctgacagtgttgtcatgactggatcttacaataatttcttcagaatgtttgacagaaacacaaagcgagacataaccctagaagcatcgcgggaaaacaataagcctcgcacagttctgaagcctcgcaaagtctgtgcaagtggcaagcgaaagaaagatgaaataagtgttgacagcctagacttcaataagaaaatccttcacacagcctggcaccccaaggaaaatatcattgccgtagctactacaaacaatctgtatatatttcaagacaaagtgaattagggttggcattcctagcagaagaacccacttcctgcttagttgagatagttgaatctagcattcgttcctataaaagagagaggtccattgtggcgcccctttccagtgtttgacagtgtgccattcgacaacacattgttatagctacatggagaaagctctgtggattcatcactgtggtgttctccatgtctgctagccatttaggtaagggtagggcacttttaatttaaatgacttcttgcaccatcttgcctaatggactagattggactgtatcaacattgatttactccactttttatgccttccattgtgatgacgtcaaacacagtgaaagccttcagtcatgctatgggatttaattgtgtatcctcattactgtatcatttgtggggtacaccccttccccctttttttaaattaaatacagctcattcttactgtggcttgtagcattcctcctcttctggcctcctggactgctccccttcatctcttacccttgccccctccacccggtcttggtggtggtatattaaaaaaagaaagaatgaaagcacacaaaatgagtcagtttggggtcagtggtataaagggggtatatgttgcaaacaaatgttttagtaacagttggctgtaatcactcctcgccgtgtctggcactgaaaataaggaaaag

SEQ ID NO: 247 - DNA, 2578 bp, Homo sapiens
cttttgtctctcagctattttttgttccctatgtttgtaggatggaaaggcagatgtaaagtccctcatggcgaaatataacacggggggcaacccgacagaggatgtctcagtcaatagccgacccttcagagtcacagggccaaactcatcttcaggaatacaagcaagaaagaacttattcaacaaccaaggaaatgccagccctcctgcaggacccagcaatgtacctaagtttgggtccccaaagccacctgtggcagtcaaaccttcttctgaggaaaagcctgacaaggaacccaagcccccgtttctaaagcccactggagcaggccaaagattcggaacaccagccagcttgaccaccagagaccccgaggcgaaagtgggatttctgaaacctgtaggccccaagcccatcaacttgcccaaagaagattccaaacctacatttccctggcctcctggaaacaagccatctcttcacagtgtaaaccaagaccatgacttaaagccactaggcccgaaatctgggcctactcctccaacctcagaaaatgaacagaagcaagcgtttcccaaattgactggggttaaagggaaatttatgtcagcatcacaagatcttgaacccaagcccctcttccccaaacccgcctttggccagaagccgcccctaagtaccgagaactcccatgaagacgaaagccccatgaagaatgtgtcttcatcaaaagggtccccagctcccctgggagtcaggtccaaaagcggccctttaaaaccagcaagggaagactcagaaaataaagaccatgcaggggagatttcaagtttgccctttcctggagtggttttgaaacctgctgcgagcaggggaggcccaggtgtctccaaaaatggtgaagaaaaaaaggaagataggaagatagatgctgctaagaacaccttccagagcaaaataaatcaggaagagttggcctcagggactcctcctgccaggttccctaaggccccttctaagctgacagtgggggggccatggggccaaagtcaggaaaaggaaaagggagacaagaattcagccaccccgaaacagaagccattgcctcccttgtttaccttgggtccacctccaccaaaacccaacagaccaccaaatgttgacctgacgaaattccacaaaacctcttctggaaacagtactagcaaaggccagacgtcttactcaacaacttccctgccaccacctccaccatcccatccggccagccaaccaccattgccagcatctcacccatcacaaccaccagtcccaagcctacctcccagaaacattaaacctccgtttgacctaaaaagccctgtcaatgaagacaatcaagatggtgtcacgcactctgatggtgctggaaatctagatgaggaacaagacagtgaaggagaaacatatgaagacatagaagcatccaaagaaagagagaagaaaagggaaaaggaagaaaagaagaggttagagctggagaaaaaggaacagaaagagaaagaaaagaaagaacaagaaataaagaagaaatttaaactaacaggccctattcaagtcatccatcttgcaaaagcttgttgtgatgtcaaaggaggaaagaatgaactgagcttcaagcaaggagagcaaattgaaatcatccgcatcacagacaacccagaaggaaaatggttgggcagaacagcaaggggttcatatggctatattaaaacaactgctgtagagattgactatgattctttgaaactgaaaaaagactctcttggtgccccttcaagacctattgaagatgaccaagaagtatatgatgatgttgcagagcaggatgatattagcagccacagtcagagtggaagtggagggatattccctccaccaccagatgatgacatttatgatgggattgaagaggaagatgctgatgatggtttccctgctcctcctaaacaattggacatgggagatgaagtttacgatgatgtggatacctctgatttccctgtttcatcagcagagatgagtcaaggaactaattttggaaaagctaagacagaagaaaaggaccttaagaagctaaaaaagcaggaaaaagaagaaaaagacttcaggaaaaaatttaaatatgatggtgaaattagagtcctatattcaactaaagttacaacttccataacttctaaaaagtggggaaccagagatctacaggtaaaacctggtgaatctctagaagttatacaaaccacagatgacacaaaagttctctgcagaaatgaagaagggaaatatggttatgtccttcggagttacctagcggacaatgatggagagatctatgatgatattgctgatggctgcatctatgacaatgactagcactcaactttggtcattctgctgtgttcattaggtgccaatgtgaagtctggattttaattggcatgttattgggtatcaagaaaattaatgcacaaaaccacttattatcatttgttatgaaatcccaattatctttacaaagtgtttaaagtttga

SEQ ID NO: 248 - DNA, 1377 bp, Homo sapiens
aacgaaaccaacagcagtccaagctcagtcagcagaagagataaaagcaaacaggtctgggaggcagttctgttgccactctctctcctgtcaatgatggatctcagaaataccccagccaaatctctggacaagttcattgaagactatctcttgccagacacgtgtttccgcatgcaaatcaaccatgccattgacatcatctgtgggttcctgaaggaaaggtgcttccgaggtagctcctaccctgtgtgtgtgtccaaggtggtaaagggtggctcctcaggcaagggcaccaccctcagaggccgatctgacgctgacctggttgtcttcctcagtcctctcaccacttttcaggatcagttaaatcgccggggagagttcatccaggaaattaggagacagctggaagcctgtcaaagagagagagcattttccgtgaagtttgaggtccaggctccacgctggggcaacccccgtgcgctcagcttcgtactgagttcgctccagctcggggagggggtggagttcgatgtgctgcctgcctttgatgccctgggtcagttgactggcagctataaacctaacccccaaatctatgtcaagctcatcgaggagtgcaccgacctgcagaaagagggcgagttctccacctgcttcacagaactacagagagacttcctgaagcagcgccccaccaagctcaagagcctcatccgcctagtcaagcactggtaccaaaattgtaagaagaagcttgggaagctgccacctcagtatgccctggagctcctgacggtctatgcttgggagcgagggagcatgaaaacacatttcaacacagcccagggatttcggacggtcttggaattagtcataaactaccagcaactctgcatctactggacaaagtattatgactttaaaaaccccattattgaaaagtacctgagaaggcagctcacgaaacccacgcctgtgatcctggacccggcggaccctacaggaaacttgggtggtggagacccaaagcgttggaggcagctggcacaagaggctgaggcctggctgaattacccatgctttaagaattgggatgggtccccagtgagctcctggattctgctggtgagacctcctgcttcctccctgccattcatccctgcccctctccatgaagcttgagacatatagctggagaccattctttccaaagaacttacctcttgccaaaggccatttatattcatatagtgacaggctgtgctccatattttacagtcattttggtcacaatcgagggtttctggaattttcacatcccttgtccagaattcattcccctaagagtaataataaataatctctaacacc

SEQ ID NO: 249 - DNA, 4267 bp, Homo sapiens
cttcctctgccaccatcggggaactgggctgtgaatgaggggctctccatttttgctattctggtttggctggggttgaacgtcttcctctttgtctggtattaccgggtttatgatattccacctaagttcttttacacaagaaaacttcttgggtcagcactggcactggccagggcccctgcagcctgcctgaatttcaactgcatgctgattctcttgccagtctgtcgaaatctgctgtccttcctcaggggttccagtgcgtgctgctcaacaagagttcgaagacaactggacaggaatctcacctttcataaaatggtggcatggatgattgcacttcactctgcgattcacaccattgcacatctatttaatgtggaatggtgtgtgaatgcccgagtcaataattctgatccttattcagtagcactctctgaacttggagacaggcaaaatgaaagttatctcaattttgctcgaaagagaataaagaaccctgaaggaggcctgtacctggctgtgaccctgttggcaggcatcactggagttgtcatcacgctgtgcctcatattaattatcacttcctccaccaaaaccatccggaggtcttactttgaagtcttttggtacacacatcatctctttgtgatcttcttcattggccttgccatccatggagctgaacgaattgtacgtgggcagaccgcagagagtttggctgtgcataatataacagtttgtgaacaaaaaatctcagaatggggaaaaataaaggaatgcccaatccctcagtttgctggaaaccctcctatgacttggaaatggatagtgggtcccatgtttctgtatctctgtgagaggttggtgcggttttggcgatctcaacagaaggtggtcatcaccaaggtggtcactcaccctttcaaaaccatcgagctacagatgaagaagaaggggttcaaaatggaagtgggacaatacatttttgtcaagtgcccaaaggtgtccaagctggagtggcacccttttacactgacatccgcccctgaggaagacttctttagtatccatatccgcatcgttggggactggacagaggggctgttcaatgcttgtggctgtgataagcaggagtttcaagatgcgtggaaactacctaagatagcggttgatgggccctttggcactgccagtgaagatgtgttcagctatgaggtggtgatgttagtgggagcagggattggggtcacacccttcgcatccattctcaagtcagtctggtacaaatattgcaataacgccaccaatctgaagctcaaaaagatctacttctactggctgtgccgggacacacatgcctttgagtggtttgcagatctgctgcaactgctggagagccagatgcaggaaaggaacaatgccggcttcctcagctacaacatctacctcactggctgggatgagtctcaggccaatcactttgctgtgcaccatgatgaggagaaagatgtgatcacaggcctgaaacaaaagactttgtatggacggcccaactgggataatgaattcaagacaattgcaagtcaacaccctaataccagaataggagttttcctctgtggacctgaagccttggctgaaaccctgagtaaacaaagcatctccaactctgagtctggccctcggggagtgcatttcattttcaacaaggaaaacttctaacttgtctcttccatgaggaaataaatgtgggttgtgctgccaaatgctcaaataatgctaattgataatataaataccccctgcttaaaaatggacaaaaagaaactataatgtaatggttttcccttaaaggaatgtcaaagattgtttgatagtgataagttacatttatgtggagctctatggttttgagagcacttttacaaacattatttcatttttttcctctcagtaatgtcagtggaagttagggaaaagattcttggactcaattttagaatcaaaagggaaaggatcaaaaggttcagtaacttccctaagattatgaaactgtgaccagatctagcccatcttactccaggtttgatactctttccacaatactgagctgcctcagaatcctcaaaatcagtttttatattccccaaaagaagaaggaaaccaaggagtagctatatatttctactttgtgtcatttttgccatcattattatcatactgaaggaaattttccagatcattaggacataatacatgttgagagtgtctcaacacttattagtgacagtattgacatctgagcatactccagtttactaatacagcagggtaactgggccagatgttctttctacagaagaatattggattgattggagttaatgtaatactcatcatttaccactgtgcttggcagagagcggatactcaagtaagttttgttaaatgaatgaatgaatttagaaccacacaatgccaagatagaattaatttaaagccttaaacaaaatttatctaaagaaataacttctattactgtcatagaccaaaggaatctgattctccctagggtcaagaacaggctaaggatactaaccaataggattgcctgaagggttctgcacattcttatttgaagcatgaaaaaagagggttggaggtggagaattaacctcctgccatgactctggctcatctagtcctgctccttgtgctataaaataaatgcagactaatttcctgcccaaagtggtcttctccagctagcccttatgaatattgaacttaggaattgtgacaaatatgtatctgatatggtcatttgttttaaataacacccaccccttattttccgtaaatacacacacaaaatggatcgcatctgtgtgactaatggtttatttgtattatatcatcatcatcatcctaaaattaacaacccagaaacaaaaatctctatacagagatcaaattcacactcaatagtatgttctgaatatatgttcaagagagagtctctaaatcactgttagtgtggccaagagcagggttttctttttgttcttagaactgctcccatttctgggaactaaaaccagttttatttgccccaccccttggagccacaaatgtttagaactcttcaacttcggtaatgaggaagaaggagaaagagctgggggaagggcagaagactggtttaggaggaaaaggaaataaggagaaaagagaatgggagagtgagagaaaataaaaaaggcaaaagggagagagaggggaagggggtctcatattggtcattccctgccccagatttcttaaagtttgatatgtatagaatataattgaaggaggtatacacatactgatgttgttttgattatctatggtattgaatcttttaaaatctggtcacaaattttgatgctgagggggattattcaagggactaggatgaactaaataagaactcagttgttctttgtcatactactattcctttcgtctcccagaatcctcagggcactgagggtaggtctgacaaataaggcctgctgtgcgaatatagcctttctgaaatgtaccaggatggtttctgcttagagacacttaggtccagcctgttcacactgcacctcaggtatcaattcatctattcaacagatatttattgtgttattactatgagtcaggctctgtttattgtttcaattctttacaccaaagtatgaactggagagggtacctcagttataaggagtctgagaatattggccctttctaacctatgtgcataattaaaaccagcttcatttgttgctccgagagtgtttctccaaggttttctatcttcaaaaccaactaagttatgaaagtagagagatctgccctgtgttatccagttatgagataaaaaatgaatataagagtgcttgtcattataaaagtttcctttttatctctcaagccaccagctgccagccaccacgagccagctgccagcctagctttttttttttttttttttttagcacttagtatttagcatttattaacaggtactctaagaatgatgaagcattgtttttaatcttaagactatgaaggtttttcttagttcttctgcttttgcaattgtgtttgtgaaatttgaatacttgcaggctttgtatgtgaataattctagcgggggacctgggagataattctacggggaattcttaaaactgtgctcaactattaaaatgaatgagctttc

SEQ ID NO: 250 - DNA, 3014 bp, Homo sapiens
gcggagcccacggagcccacggaggagcccacggaggagccccagcgtccgaacgggcagaccccctcgagccgcgaaggagcccgagaagcagccacgatgtgcggaatctttgcctacatgaactacagagtcccccggacgaggaaggagatcttcgaaaccctcatcaagggcctgcagcggctggagtacagaggctacgactcggcaggtgtggcgatcgatgggaataatcacgaagtcaaagaaagacacattcagctggtcaagaaaagggggaaagtcaaggctctcgatgaagaactttacaaacaagacagcatggacttaaaagtggagtttgagacacacttcggcattgcccacacgcgctgggccacccacggggtccccagtgctgtcaacagccaccctcagcgctcagacaaaggcaacgaatttgttgtcatccacaatgggatcatcacaaattacaaagatctgaggaaatttctggaaagcaaaggctacgagtttgagtcagaaacagatacagagaccatcgccaagctgattaaatatgtgttcgacaacagagaaactgaggacattacgttttcaacgttggtcgagagagtcattcagcagttggaaggtgcattcgcgctggttttcaagagtgtccactacccaggagaagccgttgccacacggagaggcagccccctgctcatcggagtccggagcaaatacaagctctccacagaacagatccctatcttatacaggacgtgcactctggagaatgtgaagaatatctgtaagacacggatgaagaggctggacagctccgcctgcctgcatgctgtgggcgacaaggccgtggaattcttctttgcttctgatgcaagcgctatcatagagcacaccaaccgggtcatcttcctggaggacgatgacatcgccgcagtggctgatgggaaactctccattcaccgggtcaagcgctcggccagtgatgacccatctcgagccatccagaccttgcagatggaactgcagcaaatcatgaaaggtaacttcagtgcgtttatgcagaaggagatcttcgaacagccagaatcagttttcaatactatgagaggtcgggtgaattttgaaaccaacacagtgctcctgggtggcttgaaggaccacttgaaggagattcgacgatgccgacggctcatcgtgattggctgtggaaccagctaccacgctgccgtggctacgcggcaagttttggaggaactgactgagcttcctgtgatggttgaacttgctagtgattttctggacaggaacacacctgtgttcagggatgacgtttgctttttcatcagccagtcaggcgagaccgcggacaccctcctggcgctgcgctactgtaaggaccgcggcgctctcaccgtgggcgtcaccaacaccgtgggcagctccatctctcgcgagaccgactgcggcgtccacatcaacgcagggccggagatcggcgtggccagcaccaaggcttataccagtcagttcatctctctggtgatgtttggtttgatgatgtctgaagaccgaatttcactacaaaacaggaggcaagagatcatccgtggcttgagatctttacctgagctgatcaaggaagtgctgtctctggaggagaagatccacgacttggccctggagctctacacgcagagatcgctgctggtgatggggcggggctacaactatgccacctgcctggaaggagccctgaaaattaaagagataacctacatgcactcagaaggcatcctggctggggagctgaagcacgggcccctggcactgattgacaagcagatgcccgtcatcatggtcattatgaaggatccttgcttcgccaaatgccagaacgccctgcagcaagtcacggcccgccagggtcgccccattatactgtgctccaaggacgatactgaaagttccaagtttgcgtataagacaattgagctgccccacactgtggactgcctccagggcatcctgagcgtgattccgctgcagctgctgtccttccacctggctgttctccgaggatatgacgttgacttccccagaaatctggccaagtctgtaactgtggaatgaggctgagaccgtgacaagaccatcaccacctttcatctgattccagacctgtcccaacagcagggatgctacatgggaagagaagtggacatcccacatgttctgcgtgctcctgtagagcttgacagcttccacgtgccttctacccaagtgcttttgcttacagcagatactgtttctctgtgtcctgaagtcgccagaggagaagggaatcattgtttacacatggggatcagagcagacttctccactactgtgcaatagagatacagctctcttcagagtaactgtgaaccttttataaccaacactagagttagttttaaaagacaagatatttataatgacgactgtatagcttttaagttatttttctagtatgtggctttctgtagccgtggtaacggccaaactgttcatcctagctacccatgctctgtgtccaggcttgctcctggcaggtggcattcatctcagatgtgagcacaaggcattggccctctggactcctttctccttttctttcctctctaggctgctcctgaatcctgttctctgacatccgtggagcccctcctgcatccacctatgcctcctataagtccagttgaaatctcagcctccttcaacattttcttctcgtgtgtggcccacatccctccacttctccaacttctgtttaatctgatcacggctctttttaagccctggcagcattttggtccctgctccttgcccatagtaaaacagcttgaaatatcccatgcaagagagtagtttcaagtgggcgactctgctctctatttaaaagcgtgcacaatcaaaagtactatgcaattttaggacaataaagaacatacagttcc

SEQ ID NO: 251 - DNA, 1535 bp, Homo sapiens
cctccgctcagtccgggagcgcacgtgggccgcggcgctccgacctccgctttcccaccgcccgcagctgaagcacatcccgcagcccggcgcggactccgatcgccgcagttgccctctggcgccatgtcgcagaacggagcgcccgggatgcaggaggagagcctgcagggctcctgggtagaactgcacttcagcaataatgggaacgggggcagcgttccagcctcggtttctatttataatggagacatggaaaaaatactgctggacgcacagcatgagtctggacggagtagctccaagagctctcactgtgacagcccacctcgctcgcagacaccacaagataccaacagggcttctgaaacagatacccatagcattggagagaaaaacagctcacagtctgaggaagatgatattgaaagaaggaaagaagttgaaagcatcttgaagaaaaactcagattggatatgggattggtcaagtcggccggaaaatattccccccaaggagttcctctttaaacacccgaagcgcacggccaccctcagcatgaggaacacgagcgtcatgaagaaagggggcatattctctgcagaatttctgaaagttttccttccatctctgctgctctctcatttgctggccatcggattggggatctatattggaaggcgtctgacaacctccaccagcaccttttgatgaagaactggagtctgacttggttcgttagtggattacttctgagcttgcaacatagctcactgaagagctgttagatcctggggtggccacgtcacttgtgtttatttgttctgtaaatgctgcgttcctaatttagtaaaataaaagaatagacactaaaatcatgttgatctataattacacctatgggatcaataagcatgtcagactgattaatgtctactgtgaaaatttggtagtaaattttcatttgatattagatataaatatctgaatataaataattttaatatactagtcatgatgtgtgttgtattttaaaaattatctgcaaccttaattcagctgaagtactttatatttcaaaagaatgaataacattgataataaaatcgctactttaaggggtttgtccaaaataaatattgtggccttatatatcacactattgtagaaagtattatttaatttaaatggatgcaggttgtctactaaagaaagattatatataactatgctaattgttcataatcaacagaaaccaagatagagctacaaactcagctgtacagttcgtacactaaactcttcttgcttttgcattataaggaattaagtctccgattattaggtgatcaccctggatgatcagttttctgctgaaggcacctactcagtatcttttcctctttatcactctgcattggtgaatttaatcctctcctttgtgttcaacttttgtgtgcttttaaaatcagctttattctaagcaaatctgtgtctactttaaaaaactggaaatggaaaaaaaaataaatctt

SEQ ID NO: 252 - DNA, 1411 bp, Homo sapiens
cgggaaacggcaaacagcgagatatccgagcgagagtcccgccctgcatcagtttgcggaaccgccttggtagaaggagagaaggggagtggaggaagcacgggactggagggaccaaagttccccgatggcggcccaggggtgcgcggcatcgcggctgctccagctgctgctgcagcttctgcttctactgttgctgctggcggcgggcggggcgcgcgcgcggtggcgcgcggagggcaccagcgcacacttgcgggacatcttcctgggccgctgcgccgagtaccgcgcactgctgagtcccgagcagcggaacaagaactgcacagccatctgggaagcctttaaagtggcgctggacaaggatccctgctccgtgctgccctcagactatgacctttttattaacttgtccaggcactctattcccagagataagtccctgttctgggaaaatagccacctccttgttaacagctttgcagacaacacccgtcgttttatgcccctgagcgatgttctgtatggcagggttgcagatttcttgagctggtgtcgacagaaaaatgactctggactcgattaccaatcctgccctacatcagaagactgtgaaaataatcctgtggattccttttggaaaagggcatccatccagtattccaaggatagttctggggtgatccacgtcatgctgaatggttcagagccaacaggagcctatcccatcaaaggtttttttgcagattatgaaattccaaacctccagaaggaaaaaattacacgaatcgagatctgggttatgcatgaaattgggggacccaatgtggaatcctgcggggaaggcagcatgaaagtcctggaaaagaggctgaaggacatggggttccagtacagctgtattaatgattaccgaccagtgaagctcttacagtgcgtggaccacagcacccatcctgactgtgccttaaagtcggcagcagccgctactcaaagaaaagccccaagtctttatacagaacaaagggcgggtcttatcattcccctctttctggtgctggcttcccggactcaactgtaactggaaactgtgttgctctaaccctcctccagccctgcagcctccccttgcagtcatcattcgtgttctgtgtataccaaatgattctgttatctaaagaagctttttgctgggaaaacgatgtcctgaaaatggtatttcaatgaggcatatgttcaggatttcagaaacaagaagttagttctatttagcaggttaaaaaatgctgcattagaattaaagcaagttattttcttatttgtataatgacacaaagcattgggagtcagactgcttgtatattatcaaacattttaagagaattctaataaagctgtattttacatc

SEQ ID NO: 253 - DNA, 2331 bp, Homo sapiens
  misc_feature (2131)..(2307): Each "n" represents a nucleotide selected from a, t, g or c, or contains no nucleotide.
cagtttcaagaggaaaagttaaataaattgcagaagttacttattcttttaagaggtctgcctggttytgggaaaacaacattgtctcggtaagtaaaggataccaactgaatacttggtaattcattatttaaaaattataaatgatatttgtcgccggctgcagtgactcatgcrtgtaatcccaacactttgggaggccagggtggaccagtcacttgagctcaggagtttgagaccagcctgggcaacatagtgagaccctgtctctaaaaaatgaaataaaaatgttagaactataatgatacttgtaatcactgacaagtgcttttatgtttctagtagaagaaaatctttaatttgctacacttgrgaatagcatctgacagtgtaactatttaaaaatcttttctgatagaagaaaggagaattggcatatgtttatatttagattctgctaagggctttaaaaatagataacaytacgtataattatggcagtgatgaaagcaaatgctacttgagaactgtcctggcctacccttttgagtcagctgttcaaggaaagttggactcagtgttagaaaatttgagtttttcaagttcagttggaggtgagaaaaagagaaaatttgggtattgactcagttatttccctttttcaccttgggcaagttttgctctctgttaatggaataaatgatacttactttttctggaattgggaatcaaatgagatgacccaaggaaaggaattttgaatgtgttgagcactgtgccatgttcataccattgattggcagaaggaacccttttttgatttcttaaaattcaggagtttgaagtgagtaatatctgaattggtgttagaactgttggyggtttattgtattacaagatatttcaaattcctttttttgtttacacttttaaactattgatgcacttgaatatgtttatgcagttgtgaaaaaatagygtaaagaaagcagtacaaattatcttgagtttatataagatgattcaagatttgtgccggacaaggagaaaaagaaaatttgttgatatctttgggtgaggatggagaggtccaagaaaccattttgcaaatgttttatattactaacaagacaatctaaacctaaataaacatctttttcagagaaaagacactagagaaagatttaatttgtgatamttcaagctagattatraactgtgatctttgtgaatgaattaattcattccagaattaaattttggtctttgtattttgattccttttactttagtgaggattttgtagagaagatgaaatttcacctctataataatagaagttaggagtgaggtctcacaaacatgggctgccttctagatttgggatataccatcagggacaataaataactgaaatttggaaactggataaargagtctgctagttaggaccacttgactaagagtgggtatagaagaaacctaaggaagaaaagttagatttgagacaacatattggagtatgttgaaattaaaggtgaataaagtagtggaaattcgatagaatttaaaggagacattgtagtgggagatggtagaggtgattagatataatatgtatatttatttgaaaaatagatatataagaatgaaagttgtatgtagtaccaacaagtaccattcgtattatgattcacaatttacagagtattttcatatataaaaatcttgtgcaatgggttgttttttcattttatagaaggagcagaggctaaaggaagttgaggttaagtgatttggaagtcacaaaaactagtaagagctcaaactagcaataaaattatagtatgtttttcccttgccttctctgtaatgcttaatggttgtgtagtcttatacgtgactcctgacttcaaggatcctggtctgtacctctttaggtcaacacgttttgagtgaactggtgttggttatttggaattagatataaagtcatatattctttggtgaggaatggcttcatataggagttcacaygcaaaacaagctttgccaaaataatagagtgaaaattggtagatcagagttgaggctgattggagggccaaactgaaagactggctgggcatgntggctcacacctgaaaacccagcactttgggagcccaaggcaggcagattgtttgagcccaggaattcaagaccagcctagataacctgggtatcccagctacttgggaggctgagctgccgaggctgcagtgacccatgatcgtgccatttctttctaacctgggtkacaggttnaaaccctttcccaaaaaaaaaaaa

SEQ ID NO: 254 - DNA, 3100 bp, Homo sapiens
actcgtctctggtaaagtctgagcaggacagggtggctgactggcagatccagaggttcccttggcagtccacgccaggccttcaccatggatcagttccctgaatcagtgacagaaaactttgagtacgatgatttggctgaggcctgttatattggggacatcgtggtctttgggactgtgttcctgtccatattctactccgtcatctttgccattggcctggtgggaaatttgttggtagtgtttgccctcaccaacagcaagaagcccaagagtgtcaccgacatttacctcctgaacctggccttgtctgatctgctgtttgtagccactttgcccttctggactcactatttgataaatgaaaagggcctccacaatgccatgtgcaaattcactaccgccttcttcttcatcggcttttttggaagcatattcttcatcaccgtcatcagcattgataggtacctggccatcgtcctggccgccaactccatgaacaaccggaccgtgcagcatggcgtcaccatcagcctaggcgtctgggcagcagccattttggtggcagcaccccagttcatgttcacaaagcagaaagaaaatgaatgccttggtgactaccccgaggtcctccaggaaatctggcccgtgctccgcaatgtggaaacaaattttcttggcttcctactccccctgctcattatgagttattgctacttcagaatcatccagacgctgttttcctgcaagaaccacaagaaagccaaagccattaaactgatccttctggtggtcatcgtgtttttcctcttctggacaccctacaacgttatgattttcctggagacgcttaagctctatgacttctttcccagttgtgacatgaggaaggatctgaggctggccctcagtgtgactgagacggttgcatttagccattgttgcctgaatcctctcatctatgcatttgctggggagaagttcagaagatacctttaccacctgtatgggaaatgcctggctgtcctgtgtgggcgctcagtccacgttgatttctcctcatctgaatcacaaaggagcaggcatggaagtgttctgagcagcaattttacttaccacacgagtgatggagatgcattgctccttctctgaagggaatcccaaagccttgtgtctacagagaacctggagttcctgaacctgatgctgactagtgaggaaagatttttgttgttatttcttacaggcacaaaatgatggacccaatgcacacaaaacaaccctagagtgttgttgagaattgtgctcaaaatttgaagaatgaacaaattgaactctttgaatgacaaagagtagacatttctcttactgcaaatgtcatcagaactttttggtttgcagatgacaaaaattcaactcagactagtttagttaaatgagggtggtgaatattgttcatattgtggcacaagcaaaagggtgtctgagccctcaaagtgaggggaaaccagggcctgagccaagctagaattccctctctctgactctcaaatcttttagtcattatagatcccccagactttacatgacacagctttatcaccagagagggactgacacccatgtttctctggccccaagggaaaattcccagggaagtgctctgataggccaagtttgtatcaggtgcccatccctggaaggtgctgttatccatggggaagggatatataagatggaagcttccagtccaatctcatggagaagcagaaatacatatttccaagaagttggatgggtgggtactattctgattacacaaaacaaatgccacacatcacccttaccatgtgcctgatccagcctctcccctgattacaccagcctcgtcttcattaagccctcttccatcatgtccccaaacctgcaagggctccccactgcctactgcatcgagtcaaaactcaaatgcttggcttctcatacgtccaccatggggtcctaccaatagattccccattgcctcctccttcccaaaggactccacccatcctatcagcctgtctcttccatatgacctcatgcatctccacctgctcccaggccagtaagggaaatagaaaaaccctgcccccaaataagaagggatggattccaaccccaactccagtagcttgggacaaatcaagcttcagtttcctggtctgtagaagagggataaggtacctttcacatagagatcatcctttccagcatgaggaactagccaccaactcttgcaggtctcaacccttttgtctgcctcttagacttctgctttccacacctgcactgctgtgctgtgcccaagttgtggtgctgacaaagcttggaagagcctgcaggtgccttggccgcgtgcatagcccagacacagaagaggctggttcttacgatggcacccagtgagcactcccaagtctacagagtgatagccttccgtaacccaactctcctggactgccttgaatatcccctcccagtcaccttgtgcaagcccctgcccatctgggaaaataccccatcattcatgctactgccaacctggggagccagggctatgggagcagcttttttttcccccctagaaacgtttggaacaatgtaaaactttaaagctcgaaaacaattgtaataatgctaaagaaaaagtcatccaatctaaccacatcaatattgtcattcctgtattcacccgtccagaccttgttcacactctcacatgtttagagttgcaatcgtaatgtacagatggttttataatctgatttgttttcctcttaacgttagaccacaaatagtgctcgctttctatgtagtttggtaattatcattttagaagactctaccagactgtgtattcattgaagtcagatgtggtaactgttaaattgctgtgtatctgatagctctttggcagtctatatgtttgtataatgaatgagagaataagtcatgttccttcaagatcatgtaccccaatttacttgccattactcaattgataaacatttaacttgtttccaatgtttagcaaatacatattttatagaacttc

SEQ ID NO: 255 - DNA, 555 bp, Homo sapiens
atgagccgcacagcctacacggtgggagccctgcttctcctcttggggaccctgctgccggctgctgaagggaaaaagaaagggtcccaaggtgccatccccccgccagacaaggcccagcacaatgactcagagcagactcagtcgccccagcagcctggctccaggaaccgggggcggggccaagggcggggcactgccatgcccggggaggaggtgctggagtccagccaagaggccctgcatgtgacggagcgcaaatacctgaagcgagactggtgcaaaacccagccgcttaagcagaccatccacgaggaaggctgcaacagtcgcaccatcatcaaccgcttctgttacggccagtgcaactctttctacatccccaggcacatccggaaggaggaaggttcctttcagtcctgctccttctgcaagcccaagaaattcactaccatgatggtcacactcaactgccctgaactacagccacctaccaagaagaagagagtcacacgtgtgaagcagtgtcgttgcatatccatcgatttggattaa

SEQ ID NO: 256 - DNA, 2034 bp, Homo sapiens
aaaccttggccatggtcacttcctcttttccaatctctgtggcagtttttgccctaataaccctgcaggttggtactcaggacagttttatagctgcagtgtatgaacatgctgtcattttgccaaataaaacagaaacaccagtttctcaggaggatgccttgaatctcatgaacgagaatatagacattctggagacagcgatcaagcaggcagctgagcagggtgctcgaatcattgtgactccagaagatgcactttatggatggaaatttaccagggaaactgttttcccttatctggaggatatcccagaccctcaggtgaactggattccgtgtcaagacccccacagatttggtcacacaccagtacaagcaagactcagctgcctggccaaggacaactctatctatgtcttggcaaatttgggggacaaaaagccatgtaattcccgtgactccacatgtcctcctaatggctactttcaatacaataccaatgtggtgtataatacagaaggaaaactcgtggcacgttaccataagtaccacctgtactctgagcctcagtttaatgtccctgaaaagccggagttggtgactttcaacaccgcatttggaaggtttggcattttcacgtgctttgatatattcttctatgatcctggtgttaccctggtgaaagatttccatgtggacaccatactgtttcccacagcttggatgaacgttttgccccttttgacagctattgaattccattcagcttgggcaatgggaatgggagttaatcttcttgtggccaacacacatcatgtcagcctaaatatgacaggaagtggtatttatgcaccaaatggtcccaaagtgtatcattatgacatgaagacagagttgggaaaacttctcctttcagaggtggattcacatcccctatcctcgcttgcctacccaacagctgttaattggaatgcctacgccaccaccatcaaaccatttccagtacagaaaaacactttcaggggatttatttccagggatgggttcaacttcacagaactttttgaaaatgcaggaaaccttacagtctgtcaaaaggagctttgctgtcatttaagctacagaatgttacaaaaagaagagaatgaagtatacgttctaggagcttttacaggattacatggccgaaggagaagagagtactggcaggtctgcacaatgctgaagtgcaaaactactaatttgacaacttgtggacggccagtagaaactgcttctacaagatttgaaatgttctccctcagtggcacatttggaacagagtatgtttttcctgaagtgctacttaccgaaattcatctgtcacctggaaaatttgaggtgctgaaagatgggcgtttggtaaacaagaatggatcatctgggcctatactaacagtgtcactctttgggaggtggtacacaaaggactcactttacagctcatgtgggaccagcaattcagcaataacttacctgctaatattcatattattaatgatcatagctttgcaaaatattgtaatgttatagggcgtctctttatcactcagcttctgcatcatatgcttggctgaatgtgtttatcggcttcccaagtttactaagaaactttgaagggctacttcagtagtatagaccagtgagtcctaaatattttttctcatcaataattattttttaagtattatgataatgttgtccatttttttggctactctgaaatgttgcagtgtggaacaatggaaagagcctgggtgtttgggtcagataaatgaagatcaaactccagctccagcctcatttgcttgagactttgtgtgtatgggggacttgtatgtatgggagtgaggagtttcagggccattgcaaacatagctgtgcccttgaagagaatagtaatgatgggaatttagaggtttatgactgaattccctttgacattaaagactatttgaattctaaaaaaaaaaaaaaaaaaaaaaaaaaaaaa

SEQ ID NO: 257 - DNA, 2043 bp, Homo sapiens
ccctatccggacaggtggctcttgccctttagactacagttcccagcatgcccaggcgattgcgtcccagaaccgacgtcccaccgccttcccacatcggatcgcagggctcccaaaatggcgagtgaggctgcggggactcgctgagcagcggagggggagcgtgcagagccgctgcggccctcacagtccggagcccggccgtgccgtgccgtagggaacatgcacttttccattcccgaaaccgagtcccgcagcggggacagcggcggctccgcctacgtggcctataacattcacgtgaatggagtcctgcactgtcgggtgcgctacagccagctcctggggctgcacgagcagcttcggaaggagtatggggccaatgtgcttcctgcattccccccaaagaagcttttctctctgactcctgctgaggtagaacagaggagagagcagttagagaagtacatgcaagctgttcggcaagacccattgcttgggagcagcgagactttcaacagtttcctgcgtcgggcacaacaggagacacagcaggtccccacagaggaagtgtccttggaagtgctgctcagcaacgggcagaaagttctggtcaacgtgctaacttcagatcagactgaggatgtcctggaggctgtagctgcaaagctggatcttccagatgacttgattggatactttagtctattcttagttcgagaaaaagaggatggagccttttcttttgtacggaagttgcaagagtttgagctgccttatgtgtctgtcaccagccttcggagtcaagagtataagattgtgctaaggaagagttattgggactctgcctatgatgacgatgtcatggagaaccgggttggcctgaacctgctttatgctcagacggtatcagatattgagcgtgggtggatcttggtcaccaaggaacagcaccggcaactcaaatctctgcaagagaaagtctccaagaaggagttcctgagactggcccagacgctgcggcactatggctacttgcgctttgatgcctgtgtggctgacttcccagaaaaggactgtcctgtggtggtgagcgcgggcaacagtgagctcagcctgcagctccgcctgcctggccagcaactccgagaaggctccttccgggtcacccgcatgcgatgctggcgggtcacctcctctgtaccattgcccagtggaagcacgagcagcccaggccggggccggggtgaggtgcgcctggaactggcttttgaatacctcatgagcaaggaccggctacagtgggtcaccatcactagcccccaggctatcatgatgagcatctgcttgcagtccatggttgatgaactgatggtgaagaaatctggcggcagtatcaggaagatgctgcgccggcgggtggggggtactctgagacgctcagacagccagcaagcagtgaagtccccaccactgcttgagtcacctgatgccacccgggagtctatggtcaaactctcaagtaagctgagtgccgtgagcttgcggggaattggcagtcccagcacagatgccagtgccagtgatgtccacggcaatttcgccttcgagggcattggagatgaggatctgtaatctccactgcttggatgtctgccctctaccccagaggaatttacagaaacttgccctgtgcctgtgtcccccatgctaggggcggaggggtcttttccttcttctttcctacctaccccttttctcttggccaggggcctcgtatcctacctttccttgtcccctgggctggctgcacagaggattgccccttctcttttcagagctggccctcgatgccaaattagcatttagtattttgcacaaagtctaagggaccatggctgcctgccttggggaggaaccatagctccctctgggccgcttctggcctcttggagccatgggccaaaggccaaggggatgggcagaggtctgtgtttggtctggcccagttccccatcattaaactcagcctgactgctgcct

SEQ ID NO: 258 - DNA, 1895 bp, Homo sapiens
gctttccagccccaaccatgcataaaaggggttcgcggatctcggagagccacagagcccgggccgcaggcacctcctcgccagctcttccgctcctctcacagccgccagacccgcctgctgagccccatggcccgcgctgctctctccgccgcccccagcaatccccggctcctgcgagtggcactgctgctcctgctcctggtagccgctggccggcgcgcagcaggtgggtaccggcgccctggggtccccgggccggacgcggctggggtaggcacccagcgccgacagcctcgctcagtcagtgagtctcttcttccctaggagcgtccgtggccactgaactgcgctgccagtgcttgcagaccctgcagggaattcaccccaagaacatccaaagtgtgaacgtgaagtcccccggaccccactgcgcccaaaccgaagtcatgtaagtcccgccccgcgctgcctctgccaccgccggggtcccagaccctcctgctgccccaaccctgtccccagcccgacctcctgcctcacgagattcccttccctctgcagagccacactcaagaatgggcggaaagcttgcctcaatcctgcatcccccatagttaagaaaatcatcgaaaagatgctgaacaggtgagttatggtttccatgtacacaggcgactggagccgttggtcagaaatactggcatgtgccccctaaaaataaaatcaggaaaacccaggggttagttgaaggactagaaattgggattattgttttcacaattaaggtttcctttacgataattactgctctggtgccagaggatattcccaatgcctggcgtccccaccctggttcttccttcgttccaatgaatgtaggtaaaactgccttcatttgaggcccagtaggacaaacagcaacaggttctggctgtttttaatccaatagtacagtggagaccaccgccccaccccacccccattcctaaaagagcatcccaagcttagaggtccctgccacacagcacagctgtcataggcagtagccacttggttgccaggctggggaaactgcattcggagaactctagaggctggaggagcagggcaggagaagagtgttgtgcaatcagctttcccgagcacctactcagggcacccattttctcattgcagtgacaaatccaactgaccagaagggaggaggaagctcactggtggctgttcctgaaggaggccctgcccttataggaacagaagaggaaagagagacacagctgcagaggccacctggattgtgcctaatgtgtttgagcatcgcttaggagaagtcttctatttatttatttattcattagttttgaagattctatgttaatattttaggtgtaaaataattaagggtatgattaactctacctgcacactgtcctattatattcattctttttgaaatgtcaaccccaagttagttcaatctggattcatatttaatttgaaggtagaatgttttcaaatgttctccagtcattatgttaatatttctgaggagcctgcaacatgccagccactgtgatagaggctggcggatccaagcaaatggccaatgagatcattgtgaaggcaggggaatgtatgtgcacatctgttttgtaactgtttagatgaatgtcagttgttatttattgaaatgatttcacagtgtgtggtcaacatttctcatgttgaaactttaagaactaaaatgttctaaatatcccttggacattttatgtctttcttgtaaggcatactgccttgtttaatggtagttttacagtgtttctggcttagaacaaaggggcttaattattgatgttttcatagagaatataaaaataaagcacttatag

SEQ ID NO: 259 - DNA, 4457 bp, Homo sapiens
gtgagtcgcgcggacggagccggacaaaagcgggcggcggcggcaggatgaacagcatcaagaacgtgccggcgcgggtgctgagccgcaggccgggccacagcctggaggccgagcgcgagcagttcgacaagacccaggccatcagcatcagcaaagccatcaacacccaggaggcccccgtgaaggagaagcacgcccggcgcatcattctgggcacacaccacgagaagggggctttcaccttctggtcctatgccattgggctgccgctgcccagcagctccattctcagctggaagttctgccacgtcctccacaaggtccttcgagacgggcaccccaatgtgctgcatgactgccagcggtaccgcagcaacatccgggagattggagacctgtggggacatttgcatgaccgctacggacagctggtgaatgtctacaccaagctgctgctgaccaagatctccttccacctcaagcatccccagtttcccgcgggcctggaggtgacagatgaggtactggagaaggcagctgggaccgatgtcaacaacatcttccagctcactgtggagatgtttgattacatggattgtgagctgaagctttctgaatcagttttccgacagctcaacacggccatcgccgtatcccagatgtcctcaggccagtgccgcctggcccccctcatccaggtcatccaggactgcagccacctctaccactacacggtcaagctcctgttcaagctacactcttgtctccctgcggacaccctgcaaggccacagggaccggttccacgagcagtttcacagcctcaggaacttcttccgcagagcctccgacatgctgtacttcaagcggctcatccagatcccccggctgcccgagggaccccctaacttcctgcgggcctcagccctggctgagcacatcaagccggtggtggtgatccccgaggaggccccggaagatgaggagccggagaatctcattgagatcagcacagggccccccgcgggggagccagtggtggtggctgacctcttcgatcagacgtttggaccccccaatgggtctgtgaaggacgacagggacctccagattgagagcttgaagagagaggtggaaatgctccgctctgaactggagaagatcaagctggaggcccagcggtacatcgcgcagctgaagagccaggtgaatgcactggagggtgagctggaggagcagcggaagcagaagcagaaggccctggtggataatgagcagctccgccacgagctggcccagctgagggctgcccagctggagggcgagcggagccagggcctgcgtgaggaggctgagaggaaggccagtgccacggaggcgcgctacaacaagctgaaggaaaagcacagtgagctcgtccatgtgcacgcggagctgctcagaaagaacgcggacacagccaagcagctgacggtgacgcagcaaagccaggaggaggtggcgcgggtgaaggagcagctggccttccaggtggagcaggtgaagcgggagtcggagttgaagctagaggagaagagcgaccagctggagaagctcaagagggagctggaggccaaggccggagagctggcccgcgcgcaggaggccctgagccacacagagcagagcaagtcggagctgagctcacggctggacacgctgagtgcggagaaggatgctctgagtggagctgtgcggcagcgggaggcagacctgctggcggcgcagagcctggtgcgcgagacagaggcggcgctgagccgggagcagcagcgcagctcccaggagcagggcgagttgcagggccggctggcagagagggagtctcaggagcaggggctgcggcagaggctgctggacgagcagttcgcagtgttgcggggcgctgctgccgaggccgcgggcatcctgcaggatgccgtgagcaagctggacgaccccctgcacctgcgctgtaccagctccccagactacctggtgagcagggcccaggaggccttggatgccgtgagcaccctggaggagggccacgcccagtacctgacctccttggcagacgcctccgccctggtggcagctctgacccgcttctcccacctggctgcggataccatcatcaatggcggtgccacctcgcacctggctcccaccgaccctgccgaccgcctcatagacacctgcagggagtgcggggcccgggctctggagctcatggggcagctgcaggaccagcaggctctgcggcacatgcaggccagcctggtgcggacacccctgcagggcatccttcagctgggccaggaactgaaacccaagagcctagatgtgcggcaggaggagctgggggccgtggtcgacaaggagatggcggccacatccgcagccattgaagatgctgtgcggaggattgaggacatgatgaaccaggcacgccacgccagctcgggggtgaagctggaggtgaacgagaggatcctcaactcctgcacagacctgatgaaggctatccggctcctggtgacgacatccactagcctgcagaaggagatcgtggagagcggcaggggggcagccacgcagcaggaattttacgccaagaactcgcgctggaccgaaggcctcatctcggcctccaaggctgtgggctggggagccacacagctggtggaggcagctgacaaggtggtgcttcacacgggcaagtatgaggagctcatcgtctgctcccacgagatcgcagccagcacggcccagctggtggcggcctccaaggtgaaggccaacaagcacagcccccacctgagccgcctgcaggaatgttctcgcacagtcaatgagagggctgccaatgtggtggcctccaccaagtcaggccaggagcagattgaggacagagacaccatggatttctccggcctgtccctcatcaagctgaagaagcaggagatggagacgcaggtgcgtgtcctggagctggagaagacgctggaggctgaacgcatgcggctgggggagttgcggaagcaacactacgtgctggctggggcatcaggcagccctggagaggaggtggccatccggcccagcactgccccccgaagtgtaaccaccaagaaaccacccctggcccagaagcccagcgtggcccccagacaggaccaccagcttgacaaaaaggatggcatctacccagctcaactcgtgaactactaggccccccaggggtccagcagggtggctggtgacaggcctgggcctctgcaactgccctgacaggaccgagaggccttgcccctccacctggtgcccaagcctcccgccccaccgtctggatcaatgtcctcaaggcccctggcccttactgagcctgcagggtcctgggccatgtgggtggtgcttctggatgtgagtctcttatttatctgcagaaggaactttggggtgcagccaggacccggtaggcctgagcctcaactcttcagaaaatagtgtttttaatattcctcttcagaaaatagtgtttttaatattccgagctagagctcttcttcctacgtttgtagtcagcacactgggaaaccgggccagcgtggggctccctgccttctggactcctgaaggtcgtggatggatggaaggcacacagcccgtgccggctgatgggacgagggtcaggcatcctgtctgtggccttctggggcaccgattctaccaggccctccagctgcgtggtctccgcagaccaggctctgtgtgggctagaggaatgtcgcccattactcctcaggcctggccctcgggcctccgtgatgggagccccccaggaggggtcagatgctggaaggggccgctttctggggagtgaggtgagacatagcggcccaggcgctgccttcactcctggagtttccatttccagctggaatctgcagccacccccatttcctgttttccattcccccgttctggccgcgccccactgcccacctgaaggggtggtttccagccctccggagagtgggcttggccctaggccctccagctcagccagaaaaagcccagaaacccaggtgctggaccagggccctcagggaggggaccctgcggctagagtgggctaggccctggctttgcccgtcagatttgaacgaatgtgtgtcccttgagcccaaggagagcggcaggaggggtgggaccaggctgggaggacagagccagcagctgccatgccctcctgctccccccaccccagccctagccctttagcctttcaccctgtgctctggaaaggctaccaaatactggccaaggtcaggaggagcaaaaatgagccagcaccagcgccttggctttgtgttagcatttcctcctgaagtgttctgttggcaataaaatgcactttgactgtttgttgtc

SEQ ID NO: 260 - DNA, 4600 bp, Homo sapiens
gtcatgccgcccaaaaccccccgaaaaacggccgccaccgccgccgctgccgccgcggaacccccggcaccgccgccgccgccccctcctgaggaggacccagagcaggacagcggcccggaggacctgcctctcgtcaggcttgagtttgaagaaacagaagaacctgattttactgcattatgtcagaaattaaagataccagatcatgtcagagagagagcttggttaacttgggagaaagtttcatctgtggatggagtattgggaggttatattcaaaagaaaaaggaactgtggggaatctgtatctttattgcagcagttgacctagatgagatgtcgttcacttttactgagctacagaaaaacatagaaatcagtgtccataaattctttaacttactaaaagaaattgataccagtaccaaagttgataatgctatgtcaagactgttgaagaagtatgatgtattgtttgcactcttcagcaaattggaaaggacatgtgaacttatatatttgacacaacccagcagttcgatatctactgaaataaattctgcattggtgctaaaagtttcttggatcacatttttattagctaaaggggaagtattacaaatggaagatgatctggtgatttcatttcagttaatgctatgtgtccttgactattttattaaactctcacctcccatgttgctcaaagaaccatataaaacagctgttatacccattaatggttcacctcgaacacccaggcgaggtcagaacaggagtgcacggatagcaaaacaactagaaaatgatacaagaattattgaagttctctgtaaagaacatgaatgtaatatagatgaggtgaaaaatgtttatttcaaaaattttataccttttatgaattctcttggacttgtaacatctaatggacttccagaggttgaaaatctttctaaacgatacgaagaaatttatcttaaaaataaagatctagatgcaagattatttttggatcatgataaaactcttcagactgattctatagacagttttgaaacacagagaacaccacgaaaaagtaaccttgatgaagaggtgaatgtaattcctccacacactccagttaggactgttatgaacactatccaacaattaatgatgattttaaattcagcaagtgatcaaccttcagaaaatctgatttcctattttaacaactgcacagtgaatccaaaagaaagtatactgaaaagagtgaaggatataggatacatctttaaagagaaatttgctaaagctgtgggacagggttgtgtcgaaattggatcacagcgatacaaacttggagttcgcttgtattaccgagtaatggaatccatgcttaaatcagaagaagaacgattatccattcaaaattttagcaaacttctgaatgacaacatttttcatatgtctttattggcgtgcgctcttgaggttgtaatggccacatatagcagaagtacatctcagaatcttgattctggaacagatttgtctttcccatggattctgaatgtgcttaatttaaaagcctttgatttttacaaagtgatcgaaagttttatcaaagcagaaggcaacttgacaagagaaatgataaaacatttagaacgatgtgaacatcgaatcatggaatcccttgcatggctctcagattcacctttatttgatcttattaaacaatcaaaggaccgagaaggaccaactgatcaccttgaatctgcttgtcctcttaatcttcctctccagaataatcacactgcagcagatatgtatctttctcctgtaagatctccaaagaaaaaaggttcaactacgcgtgtaaattctactgcaaatgcagagacacaagcaacctcagccttccagacccagaagccattgaaatctacctctctttcactgttttataaaaaagtgtatcggctagcctatctccggctaaatacactttgtgaacgccttctgtctgagcacccagaattagaacatatcatctggacccttttccagcacaccctgcagaatgagtatgaactcatgagagacaggcatttggaccaaattatgatgtgttccatgtatggcatatgcaaagtgaagaatatagaccttaaattcaaaatcattgtaacagcatacaaggatcttcctcatgctgttcaggagacattcaaacgtgttttgatcaaagaagaggagtatgattctattatagtattctataactcggtcttcatgcagagactgaaaacaaatattttgcagtatgcttccaccaggccccctaccttgtcaccaatacctcacattcctcgaagcccttacaagtttcctagttcacccttacggattcctggagggaacatctatatttcacccctgaagagtccatataaaatttcagaaggtctgccaacaccaacaaaaatgactccaagatcaagaatcttagtatcaattggtgaatcattcgggacttctgagaagttccagaaaataaatcagatggtatgtaacagcgaccgtgtgctcaaaagaagtgctgaaggaagcaaccctcctaaaccactgaaaaaactacgctttgatattgaaggatcagatgaagcagatggaagtaaacatctcccaggagagtccaaatttcagcagaaactggcagaaatgacttctactcgaacacgaatgcaaaagcagaaaatgaatgatagcatggatacctcaaacaaggaagagaaatgaggatctcaggaccttggtggacactgtgtacacctctggattcattgtctctcacagatgtgactgtataactttcccaggttctgtttatggccacatttaatatcttcagctctttttgtggatataaaatgtgcagatgcaattgtttgggtgattcctaagccacttgaaatgttagtcattgttatttatacaagattgaaaatcttgtgtaaatcctgccatttaaaaagttgtagcagattgtttcctcttccaaagtaaaattgctgtgctttatggatagtaagaatggccctagagtgggagtcctgataacccaggcctgtctgactactttgccttcttttgtagcatataggtgatgtttgctcttgtttttattaatttatatgtatatttttttaatttaacatgaacacccttagaaaatgtgtcctatctatcttccaaatgcaatttgattgactgcccattcaccaaaattatcctgaactcttctgcaaaaatggatattattagaaattagaaaaaaattactaattttacacattagattttattttactattggaatctgatatactgtgtgcttgttttataaaattttgcttttaattaaataaaagctggaagcaaagtataaccatatgatactatcatactactgaaacagatttcatacctcagaatgtaaaagaacttactgattattttcttcatccaacttatgtttttaaatgaggattattgatagtactcttggtttttataccattcagatcactgaatttataaagtacccatctagtacttgaaaaagtaaagtgttctgccagatcttaggtatagaggaccctaacacagtatatcccaagtgcactttctaatgtttctgggtcctgaagaattaagatacaaattaattttactccataaacagactgttaattataggagccttaatttttttttcatagagatttgtctaattgcatctcaaaattattctgccctccttaatttgggaaggtttgtgttttctctggaatggtacatgtcttccatgtatcttttgaactggcaattgtctatttatcttttatttttttaagtcagtatggtctaacactggcatgttcaaagccacattatttctagtccaaaattacaagtaatcaagggtcattatgggttaggcattaatgtttctatctgattttgtgcaaaagcttcaaattaaaacagctgcattagaaaaagaggcgcttctcccctcccctacacctaaaggtgtatttaaactatcttgtgtgattaacttatttagagatgctgtaacttaaaataggggatatttaaggtagcttcagctagcttttaggaaaatcactttgtctaactcagaattatttttaaaaagaaatctggtcttgttagaaaacaaaattttattttgtgctcatttaagtttcaaacttactattttgacagttattttgataacaatgacactagaaaacttgactccatttcatcattgtttctgcatgaatatcatacaaatcagttagtttttaggtcaagggcttactatttctgggtcttttgctactaagttcacattagaattagtgccagaattttaggaacttcagagatcgtgtattgagatttcttaaataatgcttcagatattattgctttattgcttttttgtattggttaaaactgtacatttaaaattgctatgttactattttctacaattaatagtttgtctattttaaaataaattagttgttag

SEQ ID NO: 261 - DNA, 2091 bp, Homo sapiens
ggcggcggaaagtggtagcgattttcagcagagacgtagaaggcgccgggacccggaggaaccggaaaaaacagaactcagcgaaagagagctggcagtagcagtggcggtgtcccaggagaacgatgaggagaacgaagagcgctgggttggacctttacctgtggaggcaacactggccaagaagaggaaagtcttagagtttgaaagagtctatcttgataatctccccagtgcatccatgtatgagcgcagttacatgcatagagatgttatcacccatgtggtatgcaccaaaacagattttattattactgccagtcatgatggacatgtcaagttctggaaaaaaatagaagagggaattgaatttgttaaacattttcgtagtcacctgggagttattgagagtattgcagttagctctgagggagcattgttctgttctgtgggtgatgataaagcaatgaaggtgtttgatgtagtgaactttgacatgatcaacatgctgaaacttggctattttcctggacagtgtgagtggatctattgcccaggggatgcaatttcttcagttgctgcttccgaaaagagtacaggaaaaattttcatttatgatggccgaggagataaccagccacttcatatttttgacaaactccatacatcacctcttactcagatacggctaaacccagtttacaaagcagtagtgtcttctgacaaatctgggatgattgaatactggactgggcctcctcatgaatataaattccccaaaaatgtgaactgggaatataaaactgacactgatttatatgaatttgccaagtgtaaggcttatccaaccagcgtatgtttttcaccagatgggaagaaaatagctactattggttctgatagaaaagttagaattttcagatttgtaactggaaaactcatgagagtctttgatgaatcactaagcatgtttactgaactgcaacagatgaggcaacagttaccagacatggaatttggccgacgaatggctgtagaacgtgagttggagaaggttgatgctgtaagattaattaatatagtttttgatgaaactggacacttcgtgctgtatggaacaatgctgggcattaaagttataaatgtagagacaaaccggtgtgtgcggattttaggcaaacaagaaaatattagagtgatgcaattggctttgttccaggggatagccaaaaagcatcgtgctgcaactactatagaaatgaaagcttctgaaaatcctgttcttcagaatattcaagctgacccaacaatagtctgtacatcattcaaaaagaatagattttatatgtttaccaaacgagaaccagaagatacgaaaagtgcagattctgatcgagatgtttttaatgagaaaccttctaaagaagaagtcatggcagctactcaagctgaaggacctaaacgagtttcggacagtgccattatccacaccagcatgggagacattcacaccaaactttttcctgttgagtgccctaagacagtggaaaacttctgtgttcacagcagaaatggttattataatgggcatacatttcaccgtataattaagggctttatgattcagactggagatccaacaggtactggtatgggaggagaaagcatatggggaggagaatttgaagatgaatttcattcaacattacgacatgacaggccatacacactcagcatggctaacgcgggatcaaatactaatggatcccagtttttcataacggtagtaccaacgccttggcttgataataagcatacagtatttggacgagtgactaaaggaatggaagttgtacagaggatctccaacgtcaaagtcaatcccaaaacagataagccctatgaggatgtcagcatcataaatattactgtcaagtaaaataagatttgttttaatgtacttgcaaataaaaatacaatattaaacagattattttacattaggaagcttaggacttgctgaatatacagatcatgtttcaaagatacagtatttttgtattttttattaaaggctattttttaaaaatt

SEQ ID NO: 262 - DNA, 1478 bp, Homo sapiens
gcgggcgacacgagggccgcggtgcagtgtccgacccgagagttgcggcctgagtcaccggccccgccctccggagccggacgctccgggaggcccgggagcggcagtggaaccgactcccagaactccggacgtgtgcggcgcagtgagtcgcagccatgttcctggttaactcgttcttgaagggcggcggcggcggcggcgggggaggcgggggcctgggtgggggcctgggaaatgtgcttggaggcctgatcagcggggccgggggcggcggcggcggcggcggcggcggcggcggtggtggaggcggcggtggcggtggaacggccatgcgcatcctaggcggagtcatcagcgccatcagcgaggcggctgcgcagtacaacccggagcccccgcccccacgcacacattactccaacattgaggccaacgagagtgaggaggtccggcagttccggagactctttgcccagctggctggagatgacatggaggtcagcgccacagaactcatgaacattctcaataaggttgtgacacgacaccctgatctgaagactgatggttttggcattgacacatgtcgcagcatggtggccgtgatggatagcgacaccacaggcaagctgggctttgaggaattcaagtacttgtggaacaacatcaaaaggtggcaggccatatacaaacagttcgacactgaccgatcagggaccatttgcagtagtgaactcccaggtgcctttgaggcagcagggttccacctgaatgagcatctctataacatgatcatccgacgctactcagatgaaagtgggaacatggattttgacaacttcatcagctgcttggtcaggctggacgccatgttccgtgccttcaaatctcttgacaaagatggcactggacaaatccaggtgaacatccaggagtggctgcagctgactatgtattcctgaactggagccccagacccgccccctcaccgccttgctataggagtcacctggagcctcggtctctcccagggccgatcctgtctgcagtcacatctttgtggggcctgctgacccacaagcttttgttctctcagtacttgttacccagcttctcaacatccagggcccaatttgccctgcctggagttccccctggctctaggacactctaacaagctctgtccacgggtctccccattcccaccaggccctgcacacacccactccgtaacctctcccctgtacctgtgccaagcctagcacttgtgatgcctccatgccccgagggcctctctcagttctgggaggatgactccagtccctgcacgccctggcacacccttcacggttgctacccaggcggccaagctccagaccgtgccagacccaggtgccccagtgcctttgtctatattctgctcccagcctgccaggccaggaggaaataaacatgccccagttgctgatctctaa

SEQ ID NO: 263 - DNA, 432 bp, Homo sapiens
  misc_feature (281)..(281): Each "n" represents a nucleotide selected from a, t, g or c, or contains no nucleotide.
tgggggacctcccttgggagatcaatcccctgtactcctgttctttgctccgtgagaaagatccacctacgacctcaggtcctcagaccgaccagcccaaggaacatctcaccaattttaaatccggagcttgctacacttgctggaaatctggccactgggcaaggaatgcccgcagcccgggattcctcctaagccgcgtcccgtctgtgtgggaccccactgaaaatcggactgttcaactcacctggcagccactcccagagcccctggaactctgnccaaggctctctgactgactccttcccagatcttctcggcttagcggctgaagactcacactgcctgattgcctcggaagccccctagaccatcacgcacgccgagcttcgggtaactctcacagtggaagaaggcaggaatgtcaggcca

SEQ ID NO: 264 - DNA, 1729 bp, Homo sapiens
tggccagagatgcctgcccacagcctggtgatgagcagcccggccctcccggccttcctgctctgcagcacgctgctggtcatcaagatgtacgtggtggccatcatcacgggccaagtgaggctgcggaagaaggcctttgccaaccccgaggatgccctgagacacggaggaggcccccagtattgcaggagcgaccccgacgtggaacgctgcctcagggcccaccggaacgacatggagaccatctaccccttccttttcctgggcttcgtctactcctttctgggtcctaacccttttgtcgcctggatgcacttcctggtcttcctcgtgggccgtgtggcacacaccgtggcctacctggggaagctgcgggcacccatccgctccgtgacctacaccctggcccagctcccctgcgcctccatggctctgcagatcctctgggaagcggcccgccacctgtgaccagcagctgatgcctccttggccaccagaccatgggccaagagccgccgtggctatacctggggacttgatgttccttccagattgtggtgtgggccctgagtcctggtttcctggcagcctgctgcgcgtgtgggtctctgggcacagtgggcctgtgtgtgtgcccgtgtgtgtgtatgtgtgtgtgtatgtttcttagccccttggattcctgcacgaagtggctgatgggaaccatttcaagacagattgtgaagattgatagaaaatccttcagctaaagtaacagagcatcaaaaacatcactccctctccctccctaacagtgaaaagagagaagggagactctatttaagattcccaaacctaatgatcatctgaatcccgggctaagaatgcagacttttcagactgaccccagaaattctggcccagccaatctagaggcaagcctggccatctgtattttttttttccaagacagagtcttgctctcgttgcccaagctggagtgaagtggtacaatctggctcactgcagcctccgcctcccgggttcaagcgattctcccgcctcagcctcctgagtagctgggattacaggcgcgtatcaccatacccagctaatttttgtatttttagtagagacgggttcaccatgttgcccaggagggtctcgaactcctggcctcaagtgatccacgcctcggcctcccaaagtgctgggatgacaggcatgaatcactgtgctcagccaccatctggagtttaaaaggacctcccatgtgagtccctgtgtggccaggccagggacccctgccagttctatgtggaagcaaggctggggtcttgggttcctgtatggtggaagctgggtgagccaaggacagggctggctcctctgcccccgctgacgcttcccttgccgttggctttggatgtctttgctgcagtcttctctctggctcaggtgtgggtgggaggggcccacaggaagctcagccttctcctcccaaggtttgagtccctccaaagggcagtgggtggaggaccgggagctttgggtgaccagccactcaaaggaactttctggtcccttcagtatcttcaaggtttggaaactgcaaatgtcccctgatggggaatcctgtgtgtgtgtgtgtgtgtgtgtgtgtgtgtgtgtgtgtgtgtgtgttttctcctagacccgtgacctgagatgtgtgatttttagtcattaaatggaagtgtctgcc

SEQ ID NO: 265 - DNA, 18687 bp, Homo sapiens
gatcctcctgcctcagtctcctaaaaggctgggattacaggtatgaacccccaggcctgcctacttcgtgtgttttatctggcaatgctgagaggacagctagatgtcgaggacagccagatttcgaggacagccagacgtcaagggggaaagcaacttgctggctcacacagccagccaggtctattgtggagccctagtcgcaaacacatacaccccagctttcaagtttttaaatatttatttagttagttatttgttttttgagacagtcttgctctgtcacccaggctggagtgcagtggtgcaatttcagctcactgcaacctctgcctcccagattcaagtgattgctgcctcagcctccctagtagctgggactacatgtgcgcgcctgcactgcccagctaatttttgtacttttagcggaaacggggtttccccatattggccagagtggtctcaaactcctgacctcaagtgatccacccacctcggcctcccaaagtgctgggattacaggcgtgagaccgtgcccggctagctttttttttttttttttttttaattaggttgaatgcttgttgagctgggtgcctcacatccgttgtctgttatacaaagaactactgattatgggtctctacgagacaaaaatggcagaacacctacagggcacaggggagatgggagcagggattaggcttcagaatacttctccaaatgagggtgatcagggcccgacatttcactgctctaaggctcagtatcttaactatcaaatgggtacaatggggcacaaagggttactttgaggaataacggaggtgagcaatttccaaaaagttcattcctttaaaaactgcggagcacattttgtgtacatgctgtttttattgttactcatgaagacgcgggggaagctttggttgtgtaaagctgagaactgcacccaagcttccccgttcaccccacctaccaggggatttgggctaaattcctggcctggcccacaaagaagaccaagcggtcagtcccattccgtcccatcctgatttacaggaactcacaccagcgatcaatcttccttaatttgtaactgggcagtgtcccgggccagccaatagctaagactgccccccccgcaccccaccctccctgaccctgggggactctctactcagtctgcactggagctgcctggtgaccagaagtttggagtaggtttggtgctgggcaggggtggggagtagggtggaaagcatggagtgaagaggtctagggagggggtctcctcacccccgccttcctgcccgccttgatctcgggggtctctataggcttgcttccacctgggacttctgcctcctcctaccccagcccctcccgcctcaggcctgttgtgctcagccccccaggacctcccctcccccacgcctctggcctcattgtttggttaaagcaggaccccctccccctcccaccacctcccctccgactgaacagatggacagagacccgggcccacggggagaggaagggccagccggtgccgggaaagggaagcggtttggggaaaacaaaacagagggaggagccagggagaaggtggccccaggagggaggaggagggaattcgctaagagggactggggcctgagacggaatgggggcgggccccgggcggggtgggggcccctgggctcccagggtgggagctggctccgaggctggctggctccgcaggtccgctgacgtcgccgcccagatggcctccaggctgaccctgctgaccctcctgctgctgctgctggctggggtatgtggtcccttgtgggatgggggacgggggtggagacgggaggcgggatggtgcggggtgcgggcggtggctgaggattaacccttcaggctccggggaatgaggagagctcctcttgggatcattgagtgtgatccttgcacacgcactcgtagatggtggaaagagctcaggactcagacagatgcaagttctaatcttggcgggccatgtaggagctgcgcacgtggtcctgaggacgtcacttttctcagcctactcctcctgatttataaaatgttgaataaacagatcccaccctgtccaccaagcaggcttggcaggaggatcacatagggcaaggagatgggaagcattttgtgatatcaaagcaagagtttgttgtagaaaagagctgtggggaggagaggtttggctgctgtgacacagacggtggtcccaggctagggcctgtgaagacagggaagaatggtagcaaacatacgtgggtctgggtgggggtcaatagcagtgagaggtcccagtggtctgggaggtcatggactagaaataaggctaagaagtgcaggatcccaggagaaaggtaggtaggggtgtgtgtatgtgcgtgtgtgtgtgtgtgtgcacgcgcaagttggtatcacatactcagcagatgatgtagttatgagcagggagtttggaatcagagaccttgttttgacccctagctgtttctcccatttctgtgagaccctggactagttaatatgtgtcggtatgagtttctctacctgtgaaatggagctaatgcgtggtttctcagtggaggatctgttgacattggggctggataattcattgctgaggggctaccctgtgcattttaggatgttttgcagtatatctctagcctctacgcactagattccggtagcatcttccctgctgtctccctgtgacaaccaaaaatgtctctggacattgccaaatatcccctgggagtcaaaattgtttcagagccgctggcctatactacttctctctccctcccttcctgcctcccttctttcctccttccctttcttcgttcccttcctaatgtgtactgtttttccacacccactaatgggttgcaacccacagtttaaaaatttactgttctaaatcaaggagcacaagttcaaatgtctgtactagccaagcaagtgagtcaaacaggtagatatttacaggaaattgcaagaacatagataaatgacaacactcagcttcactgtttggaaaacaacttcctacagggcagtaattggtcagagattacagagtccctgactatccctcatcttctgcagagcacattcctgtgcacccccaccctcaccctgtattgccccttctctgaggaattagtggtggtggttctaagacagattgctcatctgctgcactgtcagaaattactctcttgtacaggacattttccacatccacaccttctcttcctgctttgagtattttagaggactgtgcctcgtagtaagaaaaaaatgaaactcagtttcttgaaccacaggatagagcctcctcaaatccaaatgctaccagctccagctcccaggatccagagagtttgcaagacagaggcgaagggaaggtcgcaacaacagttatctccaagatgctattcgttgaacccatcctggaggtttccagcttgccgacaaccaactcaacaaccaattcagccaccaaaataacagctaataccactgatgaacccaccacacaacccaccacagagcccaccacccaacccaccatccaacccacccaaccaactacccagctcccaacagattctcctacccagcccactactgggtccttctgcccaggacctgttactctctgctctgacttggagagtcattcaacagaggccgtgttgggggatgctttggtagatttctccctgaagctctaccacgccttctcagcaatgaagaaggtggagaccaacatggccttttccccattcagcatcgccagcctccttacccaggtcctgctcggtaagaccctgcttgaattctctccaggtcatttgttggacactcccataagagtcaccaatccagacacttacaaagccatgcctctgggaagaagctgtaaaaatgggctattatatattgggggtggggtagagggatgtatcttttcattcttgaacattccatcatttcacagtgatgtaataggcacgattgcttgtaaaactctgtgactatacaagaacatataaaataaggtcgcagccactaaccatgtttcatggcaaggagaggtgataagaaagatgaaattaggcgcagtggctcacgcctgtaatcccagcactttgggaggccaaggcgggtggatcacctgaggtcaggagttcaagaccagcctggccaacatggtgaaaccctgtctctactaaaaatacaaaaattatcagggagtggtggtgcatgcctgtaatcccagctacttgggcagctgaggcaggagaatcgcttgaacccaggaggtggaggttgcagtgagccgagaccgcaccattgcactacagtctgggtgacagagcgagactctgtctcaaaaaaaaaaaaaattatcagagatagacctagagtagatgtggttagtactgccttctagctctgtgaccttgggcagatcactttaacctctctgagccttgagtcctcttgtgtaaaatagtgatgatgctatctacctcaaaagattaagaagcagaaagccaggccgggtgcggtggttcacacctgtaatcccagcattttaggaggccgaggagggcagatcacgaggtcaggagttcgagaccagcctgactaacatggtgaaaccccgtctctactaaaaataaaaagaaattagctaggcatggtggtgcacacctgtaaccccagctactcaggaggctgaggcaggagaatcacttgaacacgggaggcagaggttgcagtgagccgaaatcatgccactgcactccagcctgggaagactgagcaagactctgtctcaaaaaaaaaaaaaagaagcagcctagtgtctgacttagtgggaggtcaaaaaaatgtaaatcctctgccatcttgagggattactgtcaagtcccatttggtaattaccctaggaatggcacaaacaaattactacaagcagtggggacagagctattactccccagagagaattctaaaaaggctacagaatctttcttggctgggcacggtgactcacacctataatcctggcactttgggaggccaaggcaggagttcaagaccagcctggccaacatgttgaaaccccatctctactaaaaatgcaaaaattagccaggcatagtgatgcatgcttattgtcccagctacttgggaggcagaggtgggaggattgcttgaacctggagattcaagtgagctgagattgcaccactgcattccagcctgggccaacaaagcaagactctgtctcaaaaaaaaaaaaaaaaaaaaaagagagagattgagagaacattccagctcagatgatctgtgatcccctccaaagcagggaataccctccattccagcctggtccccaaccctcattcccaaggaaggcccccgactcatcctgcaagtatctttcatctctgccctttgttgcaggggctggggagaacaccaaaacaaacctggagagcatcctctcttaccccaaggacttcacctgtgtccaccaggccctgaagggcttcacgaccaaaggtgtcacctcagtctctcagatcttccacagcccaggtgagtgcccaggaatgggcagtgtctgcagaggagggtcctgagaggactctgaagggggacccagcgctggggaaagaaaggacagagggaatgttggagctacagtatcagggatggactgcagagcaggtgaagaccttggcaggagcattaggtcactccaggaactagactgttcttctaatgagaccttagacaagtctctggcattcatcaactgctttagaataaaaataaccgggcaggtacagtaaaatagtgatgatgctatctacctcaaaagattaagaagcagaaagccaggctgggcgtggtggctcacacctgtaatcccagcactttgggaggccgaggcaggtggatcacgaggtcaggggttcgagaccagcctgaccaacatggtgaaaccctgtctctactaaaaatacaaaaattagctgggcatggtggcgggcacctgtaatcccagctattcaggaggctgaggcaggagaattgcttgaacctgggaggcggaggttgcagtgagccgagatgacgccactgcactccagcctgggcgacagagcaagactccgtctcaaaaaaaaaaacaaaaacaaaacaaaaacaaaaaaaaaaaacaaagaaggagaaagccgggccgggcatggtggttctcatctgtaagttcaaggagttgaaggtatgctaggactttgggaggccaaggccttcaagaccagcctgggcagcatggcgaaacctgtctccattaaaaaaaaaaaagttgggggtacggctgggcatggtggctcacacctgtaatcccagcacttttgggaggctgaggtgggtggaacacctgaggtcaggagttcaagaccagcctggccaacatggcaaaaccctgtctctattaaaaacacaaaaattagcctggcatggtggcaggcgcctataatcccaactactcaggaggctgaggcaggagaatcgcttgaacccaagagagtgaaggttgcagtgagctgagatcatgccacttcactccagcctgagtgaaacagcaaaactctgtctcaaaaaaaaaaaaaggaagaaagaaaaaaggccaggcgcggtgactcacgcctgtaatcgcaacactttggcaggccgaggcaggcgattcacaaggtcaggagttcgagaccagtctggctaactaacatagtgaaactccgtctctactgaaaatacaagaaattaccctggcatggtggtgtgcacctgtaatcccagctactcaggaggctgaggcaggagaatcgcttgaacctgggaggcagaggctgcagtgagccgagatcgcgccactgcactccagcctggatgacagagcaagactctgtctcaaaaaaaaaaggccgggcgcggtggctcatgcctgtaatcccagcactttgggaggctgaggcgggcggaccacgaggtcagaagatcaagaccatcctggctaacaagatgaaaccctgtctctgccaaaaaaatacaaaacttagccgggcatggtggcaggcgcctgtggtcccaactacttgggaggctgaggcaggagaatggcatgaacccgggaggcggagcttgcagtgagccgagattgcgccactgcactccagcctgggcaacagagcgagacaccatctcaaaaaaaaaaaaaaaaaatggggcgggcgggccaggcgcggtgtctcacacctgtaatcccagcactttgggaggctgaggtgggcggatcacttgaggtcaggagttcaagaccagcctggccaacaccaggaaaccctgtctctgttaaaaatacaaaaattagccaggtgtggtggcacgcgcctgtagtcccagcaggagaataacttcaacctgggagacagaggttgcagtcagctgagatcgcaccactgcattccagcctgggtgacagaccgagactctgtctcaaaaaaaaaaaaaaagaagaatacccatatgcattcattaatatatagggctagagggctagagagctatagacataaaatagacaaaaaatttttttgctcatttttgggtcaaaggagtcttgggactctaattcttttaatttttgtgttatgtgaatttgttatcatttacatgtattatgttattaagtaggtaataatgataatactaataataaacttacaaaacgatccaatgtagttgttttcagactttgttcctcggagccctaggactttgcaaagctgtttctggagtcatggtgggagtggggtgtggggagcctgagcagtggggaagggttcaccacttcctgtgagagggaaacggaccagctgggctctgagctccccacccagcctcagccagggtccattttatattgtgggcttcagacatgcctttgtttgaaagcagttctgctgctttaaaatgtttgataaccattgaactaatctacccacctccctttttaaaaaaaaaaggaaaacttttttttaagctgttttttttgttttttgtttttttttaaactgtaaaaacaatacttaggtctggctcagtgtgcctgtaattccaacactgagaggctgaggtaggaggattgcttgaggctagaatttcgagactagcctctgggcaacatagacagacctcatctctacaaaaaattttaaaaattatccgggtgtggtacgtgtctgtagttccagctatgaaggactgagacgggaggattgcttgagccaagaattcgaagttagagtgagctatgtttatgcctctgtactctaggttgggtaacagagtaggaccctgtctctaaaaaaaaaaaaatttaatttaaattttaaaaactcacctatcaccccatcatctgaaaaacaccctctttcagatgtgggaaaaacatggctcagaggtgttcaagaaatgttgcatttatttattacttacaaagctgtaagtcagctttatccgctgtcttgctaggttggtgaaaaatacgtaacagcattcaatattagggcttctatccccatctagctgcacactggagctgtgccaagcaaggttcttggtcttatgttgtacttaggcatcagcaaagcctgggaaaatatcttttttttttttttgagacagaatctcgctctgtcgcccaggctggaatgcagtggcaccatctcagctcactgcaacctccgtctcccagattcaagtgattctcctgcctcagcctcccgaatagctgggattacaggctggtcttgaactcctggcctccagtgatccacccaccttggcctcccaaagtgctgcgattacaggtgtgagccaccatgcccagctggggaaaatatctttaatctacttagtcctagaaaaattatctttcaagtgctttttttttttttttttcagtggactgaaggcttttgcagagcaaaagccaggaagttttgtcacaaacttccaccaaggccaggaagcagagtctattccgtgccaaaattaagggaagaaaagagggaaaatctaggcaaatggaatttaatatctcaaaaagattatcttgccgagccatagtcacatagcaagctgaggcagcggaggcttggggctacttctcttgttcttggttctgggtttaccttctttgggccttatttgccacatctgtaagaggagtgggctggaccgcgctccaccatgccgtattcactaagtgagcagatagaaccatagaaagcatgctcactctcaaatcgtgctcatggaaagaacgacgtgttcaggactcatgcctccctttctcaacatacccccagacctggccataagggacacctttgtgaatgcctctcggaccctgtacagcagcagccccagagtcctaagcaacaacagtgacgccaacttggagctcatcaacacctgggtggccaagaacaccaacaacaagatcagccggctgctagacagtctgccctccgatacccgccttgtcctcctcaatgctatctacctgagtggtaagggtgcccttagccagttagtcttcccattctgggtccttcttcccctcctggcttcaaagcccacttaaccccaagttctacaatcggatctcaatgtccctgcactactctttgctaacaaggcttttagctcctcttcatccttttcctacctgcattagagcaaccctcccacctcttccctctagccaagtggaagacaacatttgatcccaagaaaaccagaatggaaccctttcacttcaaaaactcagttataaaagtgcccatgatgaatagcaagaagtaccctgtggcccatttcattgaccaaactttgaaagccaaggtaagttcttaacctttccttctcctgtttgaaacctacttgagtctcctgactttttttctgctgtagtcccatcattttggggtacatgcttacaaattcatcacttctactccttccatctgtatttccaccctatcttttctccttctcctttctctagccttggccaaggcagacattgtatattttaggctggaaacaggattctcaagtttcttcatgcatctctactatattgaatggcaaaatgtgagtcgtgttcctattctacacatctgtttctttttccagtcaactcatcagaagactctggtggcttagcaagtcctgtgtgtatgtgggtacctgtgtacagcatacatatacatgtgtagacgtgtataagtatatccttgtatatgcatatatgtggtaagtgcatgtgtgcacatgagttaaatggcttaagtgcattagcagaaattgaacaatttagtttgatgagtagggagggagagaagacagaatatggagcccagaggatcccaactggcaagctatctcatccccagttaccagatatttccacctttttaggatggcaaaacacagacctatgagacagaaaacagtaagagacaatgtctcaatacctggctgagaaacaaaggctctgttcttggaacatgctaggcttggttccacattgggagctttccttagcttttgtttctgcctgtatccctcttcactcagatcctcacatagcttgttccttcttgtcatttgggtgtcagctcagaggtcaccttggtggagaagtcttctccccattaaagcagcctcctcctcaccctgtaatatcactcctgttttattatattcattacactcatcaccatctgaaattatgtcatttatttgcttatttgcctaggacattgtctgtctccctaagatactgtctctctacttgaatacaggaacctgtcttgtttccttctgtatctgtagtgcctagaacaatgcctcctatcataggtgctcattcagtgtttgctgaataaatgaatgaatgaaatagagggtgccaaagagagctactcagtaaaagtggctggaagacttcatagaggagggtttttttcgagacagggtctcactctgtcactcaagctgcagtgcattgacatgatctcagctcactgcaatctctgcctcccgagttcaagcagttctcctgcctcagcctcccaagtagctgggactacaggagcccgccaccacacctggctaatttttgtatttttagtagagacggggtttcaccatgttagccaagctggtctcgaactcctgacctcaagtgatccacaccctcagcctcccaaagggctgggattacaggcatgagccacagcgcccagctgaggaggttatttttgaccattctttgctcagttatttatccactcatggacttatccacccatctatccatccctatctaatgtatttgaccattcatgactcatttagcagaaccaggacagcctgtataaggcacagaagagtgaatatatgtgacaggtccagagcattgttcaaattcaagatacgttgggggaggtataaatatgagatttttttcaaatcaattggaatggctatttaatcaaagccatagatgttaggtggaaagtaggaattaagaacttaacaagttaggtttaaatgtaactattcgaattataagaacaagtatttcctctctaaaaatgtttttaaagtttcacacaaaactctaaaccaaaaatcattgtaaaaatcccttggagtagactgttgaaaccattgaggtgaggtgataggttaaggtgagcattctggacatataatatcaataataaatattcaaatacaaagcaggtataatatgaagagtaatttctatctccccaagccaatatgagttttgtttgtttgtttgtttttcttttgagataaagtctcattctgttgcccaggccggagtgcagtggcacaatcccagctctctgtaacctctgcctcccaggttcaagcgattctcctgccttagcctccctagtagctgggattataggtgcctgccaccactcccagctaatttttgtatttttagtagagatggggtttcaccatgttggccaggctggtcatgaactcctgacctcaagtgctcgtccgtcttcggcctcctaaagtgctggcattacaggcgtgagccactgcacccagcctgagttttttttttttttttaagccaaaggaggaggagtagttttgtgcacaaaagccactatttagagttccttaggttttaaacagataattaatttaatgtactaacaaatgcaaaattaaaattttacttatgccttttaattttaagctgaacttgctacattaagagtagggtgatttggctgggcgcagtggctcatgcctataatcccagcactttaggaggctgaggcaggtggatcacttgaagctaagagtttgagaccagcctggccaacatggtggaattctgtctctactaaaaatacaaaaattagccaggcatggtggcacatgtctgtaatcccagctactcaggatgctaaggcacagaatcacttgaacctgggaggcagaggttacagtgagccaaaatcgcgccactgcactccaacctgggcaacacagcaagactctgtctcaaaacacaaaaaaagaataggctgggtacagtggctcacgcctgtaatcccagcactttgggaggccgaggcaggtgaatcacctgaggtcaggagttcgagaccagcttggccaacattgtgaaaccccatctccattaaaaatacaaaaaataagccgggtgtgatggtgcacgcctgtaatcccagatacttgtgaggctgggacagaagaatcgcttgaacccgggaggcgaaggttgcagtgagccgagatcatgccactgcattccagcctgagcgacagagtgagaccttgtctcagaaaaaaaaaaatagggtgatttttatataaaaacactctcatttgttcttgaattaattgccatattgaacagattaaactcctttaaaccattttttctatctacaaacataattagtattcccataagcattttaagctccctttaaaaatttaatatgctcgattttcttttttcttttatttatttatgtagttttcccagacagggtcttactctatcacccagtctggagtacagtgacacaatcctcacttactgtaacctcaagctccttgggatgaagcagtcctcccaccctagcctcttaagtagctgagattccaggcatgagccacctcacccagctgattttctttttaaacacatctaatacctgacaggtcgtaattacgactgtgcttggccatatcatcctaacacctaaagctcacttgtaaactgaaaattaaatttgaagggtgaattaacttctagccaacattccaatatcattctcacatttaatgaaattatcctacaactttgcttaaaagcataaaactagcatgtcagagtctcttaaaaattacaatcactattttaaataacaaacatacaggttaccctgaacttaacacctggttttaacatgatgaagttggtttcttttgtcattcttatactaaattctaaatcttcctggcacttaaggatatttacccaaggaagggggtgagatttaccggctcaggtacaccgaggttactggcttgaaaattcaagaccacagcatggtaaatttttcttcagagattcaaggttcatacataggacttgaagggcacatgctactcaaatgagtatatccaacttgagtgctacatcaacagggaccccatgtccactcttttcagtcgaaattggcttactatctacttcttctgggctattcaggttccgacaattgattgctttcagttaatttctttattgcccagttgaattctgcattcttctagattctttttgttccttcagcctcaatcataataccatttaatgacagtctcatatcctattagactagggtttctcagccttggcactattgacatattgggtcagataattctttgtcctgtgcattgtagaatttagcatcttccttagcttctactcactagaagccagtagcactgtgtgcacatcctccttgccccctgccagctatgacaaccaaaatgtctccagacattaccaaatgtccactgagaggcaaattcactccgagttgacaacccctgtattaaacccaggggccctgcacttcttacatacttttgtctggtcaccagttgaaagtccttcttcttttttttttctctttttgagatggagtctcgctctgtcaccaggctggagtgcagtggcatgatctcggctcactgcagcctccacctcccgggttcaagcaattctcctgcctcagcctcctgagtagctgggattacaggcacgtgccaccacccagctaatttttgtatttttagtagaggtggggtttcatcatggtggccaggatggtctcaatctcttgacctcgtgatccgcccacctcggcctcccaaagtgctgggattacaggtgtgagccaccgtgcatgaccaaaagtccttctaatagcaaagtggaaaggtaggctgtgaacaatcttgaatgccatactaagatttgtacttattctcataggcagtgaagagccatcaatagtttttacagaggctgacctgataactctggcggttcaatgtgcatgctatatactatatgcacaacacattaggaaggaagggaacagcgctcagagaaatcaaatcacttgcccatattacatagctcgtcagtggtggagtcagggtataatcagaaactcatgctccttcctctacctctccccagcacagagttggatcagcactgttcacccagctggtatccccatttcatggtaaagcctggaagcttaggtctgactgatgcttgttgaaatacagactgtgggagcagactgcaggacagcattgtgacagagggtggggccaggagagagatgcggtaggaagactgttaagatgcatctcttattttctaggtggggcagctgcagctctcccacaatctgagtttggtgatcctggtaccccagaacctgaaacatcgtcttgaagacatggaacaggctctcagcccttctgttttcaaggccatcatggagaaactggagatgtccaagttccagcccactctcctaacactaccccgcatcaaagtgacgaccagccaggatatgctctcaatcatggagaaattgggtgagctctggcagcttagggttactcccaggccatcagaggagaaagggggatccctaagatgtagttagcattctctagagtattttttacatccataatctcagtttgtcctgcaaccctgcaagttagaggggtaggtgctattatcccattggatcattgtggaaatggaggctcagaagctttatgtgacttacccagagattccatgatttacccttgagctagtcagaggcaaaccagaacaccgacccaggtctccagctctcctgagttttttctatggttccttgtgacataggcagtggaacagtgggacaggtaaccgaggtgaattatggatgctccttccccagacacatttcaaaacagtcagccaccccgtggaatatgcaagaagctatctggaagtgcagatctggaggcttctgagtttacgagaggcaacagagactccattttcttttttttttttttttttgagacggagtcttgctctgtcacccaggacaggctggagtgcagtggtgcgatctctgctcactgcaagatccgcctcccagattcacgccatgccattctctcgcctcagcctcccgagtagctgggactacaggtgcccgccaccacgcctggctaattttgtttttgtatttttagtagagacggggtttcactgtgttaaccaggatggtcacaatctccggaccttgtgatccacctgcctcggcctcccaaagtgctgggattacaggcatgagtcaccgcgcccagcccagagactccattttctaacctttgtttttttgtttgtttgtttttgagacggagcctcactctgtcacccaggctggagcgcagtggcatgatcttgggtcactgcaacctccgcctcctgggttcaagtgattctcctacctcagcctcccaagtagctgggattacaggcacctaccaccacgcccagctaatttttttgtatttttagtagagatggggtttcaccatgttggtgaagctggtcttgaactcctgggctcaagtgatccacccacctcggcttcccaaagtgctgggattacaggtgtgagccactgtgcccagcctcattttctaacctttgatctcatgtccagccctgtcacttcatttcttgttagagaatttgaccgcctaacacatgattccatttccttgtatatgtcatctgtataggaagaaaacctcttttttattttcattcaacacttctggccaccaaacaggtgtgggagtgttttctaagcaattctccagttatctggggacaccaactgggtgtcctacaattgaatccaattctaacactctacctggaaataacatcagatcccgtgcagtttaagtgctccgccccagcaaatttccccccgtttccaatgtcagttacaagactgggttgtcacctgtgcatcagaccaaccagctataatttggagattcccacaactccctgctagggtttcatcatttgctagaatagctgacaaaactcaggagacacttacatttactggtttattatgtaaaggattaagtaaaggatacagatgaacagccagttgaagagatacatagggcaaaatctggaagggtcctgggcccagcagcatctatcctgtggagttctgtttgctaccttcctgacacatgtatgtgttcaccaaccagaaactctcagaaccctgtactttaggagaagtcatcatgtaggcatgattgattattacccaatctccagctcctctcttctccccagaggatggagagaggggctggaaagttccaagcttctaatcacacttggtctttctggtgaccagccccaatccaggagccagcaggagtagcctcattagcacaaaaggcattcctatgacccaggaaattccaagggatctagtagctctgtgtcaggaactgggatcggagaccaaatattagatggtctaatatttggagctaaagatgctcctatagcatattttcccattatttcacagcatcatggcattgcatataacctcattttttcatatatgacctatctctgatctattacctcacttccaaggtcctgggagataaggaggcaatgacatcatttttcagggttgttttagggatgaggggcaaggcctctcaccttgagagagagtggcagtgttgggcccactaatagaggatcccacgaactgccagagggtacagtatgtaatctggcaaacaagggaagaggaagagagcactgggactcaggatgaacccagagaattcaggacaaaggtctccatcagctgagggtatcatgctggcttctgactctgtttttctctggttttgccctagaattcttcgatttttcttatgaccttaacctgtgtgggctgacagaggacccagatcttcaggtttctgcgatgcagcaccagacagtgctggaactgacagagactggggtggaggcggctgcagcctccgccatctctgtggcccgcaccctgctggtctttgaagtgcagcagcccttcctcttcgtgctctgggaccagcagcacaagttccctgtcttcatggggcgagtatatgaccccagggcctgagacctgcaggatcaggttagggcgagcgctacctctccagcctcagctctcagttgcagccctgctgctgcctgcctggacttgcccctgccacctcctgcctcaggtgtccgctatccaccaaaagggctccctgagggtctgggcaagggacctgcttctattagcccttctccatggccctgccatgctctccaaaccactttttgcagctttctctagttcaagttcaccagactctataaataaaacctgacagaccatgactttctctgctttgcctttgtttttttattttttattttttattttttttaggcagggtctcaatctgtcacccaggctagagtacagtggtgagatcatggttcactgcagccttaacctcctgagctcaaacaatcctcccatctcagcctcctatgtaggtgggaccacatgggcttgccaccatgcccagctaatttttaaattttttgtaaagacagggtcttactatgttgcctaggctggtctccaactcctgggctcaagcaatcatcctaacacagcctcccgaagtgctgggattgtaggcacaccatacctctcctttgcctttgaatatcag

SEQ ID NO: 266 - DNA, 1232 bp, Homo sapiens
gcgcccccagcccccctgcaccccctcggcccctcgccttcctcttcccggcgcggccccccggcttccgcgcgccgcccgccaccaatcctcttgctaccatgtccgtggagctcgaggaggccctgccagtgacgaccgccgagggaatggccaagaaggtgaccaaggctggcggctcggcggcgttgtccccatctaagaagaggaagaatagcaagaagaagaaccagccgggcaagtacagccagctggtggtggagaccatccgtaggctgggcgagcgcaacggctcgtcgctggccaagatctacaccgaggccaagaaggttccgtggttcgaccagcagaatgggcgcacctacctcaagtactcgatcaaggcgctggtgcagaacgacacgcttctgcaggtgaagggcaccggcgccaacggttccttcaagctcaaccgcaagaagctggagggcggcggggagcggcgcggagccccggcggccgccaccgccccggcccccaccgcgcacaaagcgaagaaggcagccccgggcgcggccggctcccggcgcgcggacaagaagcccgccaggggccagaagccggagcagcgctcgcacaagaagggcgctggcgccaagaaggacaaaggcggcaaggccaagaagacggcggccgccgggggcaagaaggtgaagaaggcggccaagcccagcgtccccaaagtgcccaagggccgcaagtgagcgtgtcggccggtcagagcggccggcgtggacttttcggtgtttttgtttttctaccccaagtgacgtagattttgtacggctcacgccggccggggccgcgaggcctggtctgagcctcagggaggggccccgggtcctctcagtctttcccctcccccaacgatgtagcgtttttcgttgtttgctttaggtttttgaaacagccccggcgacgcctctattggctctcggccttggcaacggccgtcgtcatggttactggcccctaggcgccgatggccgaggccgcgcctgcccaccgggcggggtcgctggttggccgggcccaggcgcgcggggacgcggaggccgcgcatcctttcccagctccccaccctccttgcctttgggtgcgcgacaaacaatcgctccgggctcagggctgcgcggctcttcccttcattccatgggcctttttttgggcacaataaagcgtttaaacctttc

SEQ ID NO: 267 - DNA, 1497 bp, Homo sapiens
accaacctcttcgaggcacaaggcacaacaggctgctctgggattctcttcagccaatcttcattgctcaagtgtctgaagcagccatggcagaagtacctgagctcgccagtgaaatgatggcttattacagtggcaatgaggatgacttgttctttgaagctgatggccctaaacagatgaagtgctccttccaggacctggacctctgccctctggatggcggcatccagctacgaatctccgaccaccactacagcaagggcttcaggcaggccgcgtcagttgttgtggccatggacaagctgaggaagatgctggttccctgcccacagaccttccaggagaatgacctgagcaccttctttcccttcatctttgaagaagaacctatcttcttcgacacatgggataacgaggcttatgtgcacgatgcacctgtacgatcactgaactgcacgctccgggactcacagcaaaaaagcttggtgatgtctggtccatatgaactgaaagctctccacctccagggacaggatatggagcaacaagtggtgttctccatgtcctttgtacaaggagaagaaagtaatgacaaaatacctgtggccttgggcctcaaggaaaagaatctgtacctgtcctgcgtgttgaaagatgataagcccactctacagctggagagtgtagatcccaaaaattacccaaagaagaagatggaaaagcgatttgtcttcaacaagatagaaatcaataacaagctggaatttgagtctgcccagttccccaactggtacatcagcacctctcaagcagaaaacatgcccgtcttcctgggagggaccaaaggcggccaggatataactgacttcaccatgcaatttgtgtcttcctaaagagagctgtacccagagagtcctgtgctgaatgtggactcaatccctagggctggcagaaagggaacagaaaggtttttgagtacggctatagcctggactttcctgttgtctacaccaatgcccaactgcctgccttagggtagtgctaagaggatctcctgtccatcagccaggacagtcagctctctcctttcagggccaatccccagcccttttgttgagccaggcctctctcacctctcctactcacttaaagcccgcctgacagaaaccacggccacatttggttctaagaaaccctctgtcattcgctcccacattctgatgagcaaccgcttccctatttatttatttatttgtttgtttgttttattcattggtctaatttattcaaagggggcaagaagtagcagtgtctgtaaaagagcctagtttttaatagctatggaatcaattcaatttggactggtgtgctctctttaaatcaagtcctttaattaagactgaaaatatataagctcagattatttaaatgggaatatttataaatgagcaaatatcatactgttcaatggttctgaaataaacttctctgaag

SEQ ID NO: 268 - DNA, 2141 bp, Homo sapiens
cgggcgaaccccctcgcactccctctggccggcccagggcgccttcagcccaacctccccagccccacgggcgccacggaacccgctcgatctcgccgccaactggtagacatggagacccctgcctggccccgggtcccgcgccccgagaccgccgtcgctcggacgctcctgctcggctgggtcttcgcccaggtggccggcgcttcaggcactacaaatactgtggcagcatataatttaacttggaaatcaactaatttcaagacaattttggagtgggaacccaaacccgtcaatcaagtctacactgttcaaataagcactaagtcaggagattggaaaagcaaatgcttttacacaacagacacagagtgtgacctcaccgacgagattgtgaaggatgtgaagcagacgtacttggcacgggtcttctcctacccggcagggaatgtggagagcaccggttctgctggggagcctctgtatgagaactccccagagttcacaccttacctggagacaaacctcggacagccaacaattcagagttttgaacaggtgggaacaaaagtgaatgtgaccgtagaagatgaacggactttagtcagaaggaacaacactttcctaagcctccgggatgtttttggcaaggacttaatttatacactttattattggaaatcttcaagttcaggaaagaaaacagccaaaacaaacactaatgagtttttgattgatgtggataaaggagaaaactactgtttcagtgttcaagcagtgattccctcccgaacagttaaccggaagagtacagacagcccggtagagtgtatgggccaggagaaaggggaattcagagaaatattctacatcattggagctgtggtatttgtggtcatcatccttgtcatcatcctggctatatctctacacaagtgtagaaaggcaggagtggggcagagctggaaggagaactccccactgaatgtttcataaaggaagcactgttggagctactgcaaatgctatattgcactgtgaccgagaacttttaagaggatagaatacatggaaacgcaaatgagtatttcggagcatgaagaccctggagttcaaaaaactcttgatatgacctgttattaccattagcattctggttttgacatcagcattagtcactttgaaatgtaacgaatggtactacaaccaattccaagttttaatttttaacaccatggcaccttttgcacataacatgctttagattatatattccgcacttaaggattaaccaggtcgtccaagcaaaaacaaatgggaaaatgtcttaaaaaatcctgggtggacttttgaaaagcttttttttttttttttttttgagacggagtcttgctctgttgcccaggctggagtgcagtagcacgatctcggctcacttgcaccctccgtctctcgggttcaagcaattgtctgcctcagcctcccgagtagctgggattacaggtgcgcactaccacgccaagctaatttttgtattttttagtagagatggggtttcaccatcttggccaggctggtcttgaattcctgacctcagtgatccacccaccttggcctcccaaagatgctagtattatgggcgtgaaccaccatgcccagccgaaaagcttttgaggggctgacttcaatccatgtaggaaagtaaaatggaaggaaattgggtgcatttctaggacttttctaacatatgtctataatatagtgtttaggttcttttttttttcaggaatacatttggaaattcaaaacaattgggcaaactttgtattaatgtgttaagtgcaggagacattggtattctgggcagcttcctaatatgctttacaatctgcactttaactgacttaagtggcattaaacatttgagagctaactatatttttataagactactatacaaactacagagtttatgatttaaggtacttaaagcttctatggttgacattgtatatataattttttaaaaaggtttttctatatggggattttctatttatgtaggtaatattgttctatttgtatatattgagataatttatttaatatactttaaataaaggtgactgggaattgtt

SEQ ID NO: 269 - DNA, 2241 bp, Homo sapiens
ctttgcggccacttctgcaggcgtcccttcttagctctcgcccgcccctttctgcagcctaggcggcccgggttctcttctcttcctcgcgcgcccagccgcctcggttcccggcgaccatggtgacgatggaggagctgcgggagatggactgcagtgtgctcaaaaggctgatgaaccgggacgagaatggcggcggcgcgggcggcagcggcagccacggcaccctggggctgccgagcggcggcaagtgcctgctgctggactgcagaccgttcctggcgcacagcgcgggctacatcctaggttcggtcaacgtgcgctgtaacaccatcgtgcggcggcgggctaagggctccgtgagcctggagcagatcctgcccgccgaggaggaggtacgcgcccgcttgcgctccggcctctactcggcggtcatcgtctacgacgagggcagcccgcgcgccgagagcctccgcgaggacagcaccgtgtcgctggtggtgcaggcgctgcgccgcaacgccgagcgcaccgacatctgcctgctcaaaggcggctatgagaggttttcctccgagtacccagaattctgttctaaaaccaaggccctggcagccatcccacccccggttccccccagcgccacagagcccttggacctgggctgcagctcctgtgggaccccactacacgaccaggggggtcctgtggagatccttcccttcctctacctcggcagtgcctaccatgctgcccggagagacatgctggacgccctgggcatcacggctctgttgaatgtctcctcggactgcccaaaccactttgaaggacactatcagtacaagtgcatcccagtggaagataaccacaaggccgacatcagctcctggttcatggaagccatagagtacatcgatgccgtgaaggactgccgtgggcgcgtgctggtgcactgccaggcgggcatctcgcggtcggccaccatctgcctggcctacctgatgatgaagaaacgggtgaggctggaggaggccttcgagttcgttaagcagcgccgcagcatcatctcgcccaacttcagcttcatgggacagctgctgcagttcgagtcccaggtgctggccacgtcctgtgctgcggaggctgctagcccctcgggacccctgcgggagcggggcaagacccccgccacccccacctcgcagttcgtcttcagctttccggtctccgtgggcgtgcactcggcccccagcagcctgccctacctgcacagccccatcaccacctctcccagctgttagagccgccctgggggccccagaaccagagctggctcccagcaagggtaggacgggccgcatgcgggcagaaagttgggactgagcagctgggagcaggcgaccgagctccttccccatcatttctccttggccaacgacgaggccagccagaatggcaataaggactccgaatacataataaaagcaaacagaacactccaacttagagcaataacggctgccgcagcagccagggaagaccttggtttggtttatgtgtcagtttcacttttccgatagaaatttcttacctcatttttttaagcagtaaggcttgaagtgatgaaacccacagatcctagcaaatgtgcccaaccagctttactaaagggggaggaagggagggcaaagggatgagaagacaagtttcccagaagtgcctggttctgtgtacttgtccctttgttgtcgtcgttgtagttaaaggaatttcattttttaaaagaaatcttcgaaggtgtggttttcatttctcagtcaccaacagatgaataattatgcttaataataaagtatttattaagactttcttcagagtatgaaagtacaaaaagtctagttacagtggatttagaatatatttatgttgatgtcaaacagctgagcaccgtagcatgcagatgtcaaggcagttaggaagtaaatcggtgtcttgtagatatgtgcaaggtagcatgatgagcaacttgagtttgttgccactgagaagcaggcgggttgggtgggaggaggaagaaarggaagaattaggtttgaattgctttttaaaaaaaaaagaaaagaaaaagacagcatctcactatgttgccaaggctcatcttgagaagcaggcgggttgggtgggaggaggaagaaagggaagaattaggtttgaattgcttttttaaaaaaaaagaag

SEQ ID NO: 270 - DNA, 1062 bp, Homo sapiens
agcccaagaaacatctcaccaatttcaaatctgatctattcggcttagcgactgaagattgacgctgcccgatcgcctcggaagtcccctggaccatcacagaagccgagcttcgggtaactctcacagtggagggtaagtccatcccctgtttaatcgatacgggggctacccactccacgttgccttcttttcaagggcctgtttcccttgcccccataactgttgtgggtattgacggccaagcttcaaaacccctgaaaactcccccactctggtgccaacttggacaacactcttttatgcactcttttttagttatccccacctgcccacttcccttattaggccgaaatattttaaccaaattatctgcttccctgactattcctggagtacagctacatctcattgctgcccttcttcccaatccaaagcctcctttgtgtcctctaacatccccacaatatcagcccttaccacaagacctcccttcagcttaatctctcccactctaggttcccacgccgcccctaatcccacttgaagcagccctgagaaacatcgcccattctctctccataccaccccccaaaaattttcgccgctccaacacttcaacactattttgttttatttgtcttattaatatcagaaggcaggaatgtcaggcctctgagcccaggccaggccatcgcatcccctgtgacttgcacgtatacatccagatggcctgaagtaactgaagatccacaaaagaagtaaaaacagccttaactgatgacattccaccattgtgatttgttcctgccccaccctaactgatcaatgtactttgtaatctcccccacccttaagaaggttctttgtaattctccccacccttgagaatgtactttgtgagatccacccctgcccaccagagaacaaccccctttgattgtaattttttattaccttcccaaatcctataaaacagccccacccctatcttccttcactgactctcttttcggactcagccaccggcacccaggtgaaataaacagctttattgctcac

SEQ ID NO: 271 - DNA, 2500 bp, Homo sapiens
agggtcagtttttaaaggaaaaacaactaactaccttgcaagcttgctagcaggtttaagtgtaataatgtgtgggaatgactgcaccgtgactaacatgcagtgacagcttaattaatgttaacccttatcattatcatataagaatgtgagttacataagagaggagtcctgtcagttcgttctctgctgtgtccccaagaccatgaatcatggctggcatgtagtaggcatttaataatatatgttcaacaagtatttggcagtcttggagggcagaaaaggaggtggggaagatttttaaataacattttttaaaaagtcacattgtcctacaataccgatttttcttgcatatttaggaaattgagggtttttttctaaaacatgcggacatatgggaaataggatgcaacatttgcactaatgtttcagacacagttagaggtttccaagagattttgcgctggggaggctgcttgctacaagctcccaaagctctgggaggacatagtattcattcctccctcagcagaagcggtgaggcaagaggctctggggagcacccagcgttgggcttttagcatagtgtgtcaggtcttcatagtttgggcccagggcacagagaagtcacagctctccggcatcctgtgacctttaccctctttgccaagggaaaatgtggcccaccaaagcaagaaacttgagggcatgggtcaccccagccctggcatctgcccagagcccgagaaggaaggaacaatgatcctccagctacctcacggggctggcacaggtgaccactgccctggcatcacccagctgtgtccggcagcctgaaccccatctgtggggatgcgaggaggaaaatacaaaagtccttaggtgaacactgagaaggcagatgcagcagaaacctccaggccagaactacccagtcttggacctatggtggagatagagcatagctggcgatcatgtgtacttacactctaaggtcacctggttgcactatggcctcatctgtggctctgaaaatgaagatttggaaggagatcatcacagctaatgtttaacaagcccctcctgtgtgccaaatcattcacccctcaccacaaccgaatgagctaaggattctcattatatatagtttatggagagggaagtgcagacataaagaggtgaattatcttacccagatcacacagctgataagtggtggaggcagaatagaatctaaacagtgtggctccggagcccacatgcattgattcgacaagtgtttattgagcacctgccgcggacaaggccttgtgtgattaaatagggttataattagtaatataaaaatgagaaatcactaatgctttttagacttaacattttgtttttttgtaggtttcaggcacagaactgtatatccaataatagtgaaatggatcccactaattatgacagaaatgatgatacatttaaatgacttggatgttttataggtatgatctcgtgaaatcttgagagaaactgaatgacgaatgaaactattgttcctgtttcacacagaagaaaactgaggttaaaaggggtaaagtaattttgcatggcatgaagtagaaattcaaagtacaggaatttgaacttggttctgtccttttctgaagcccttgaccactatagactcaaacatcaccttgtttttccactcattcaacacttttttttttaaattatctaataggttggcactcatcatgagcccctgttctcattctgcaaatggtgaagctctctattgtcctgaccccacagttcctgtcccatgaccagggccagctcaccaaggagctgcagcagcatgtaaagtcagtgacatgcccatgcgagtacctgaggaaggtgagtgagtgcagacagatggggcctggtgcccttgagcagttcccgggtctcagctgccacacatctcatagccggtgatgctgggggaagcttacgcagtcacagtactggcttcttcctctttttctttccatacaagtggcttagggatggggtagagtagttgacttatttggatgaaaaccactatcttctgtcagaaactcaaaaggaatcattgctggcatggtaacctaaagaaaaacaaccagacaagtgcccaacgacacttaaaaaggtgatttattatcttgccaagtttaggctgggcatggtgactcgtgcctctaatcccagcattttggggggctgaggctggtggatcaccggaggccaggactttgaggccagcctgaccaatatggcaaaacctcgtccctgctgggggtacaaaaattagccgggcatggtggtgtgagcctgtagtcccagctactcaggaggctgggacaggagaattgcttggattcgggaggtgggggttttagtgggccgagatcacgccattgcactccagactgtgcgacagagcgagactctgtcaaaaaaaaaaaaaaaaaaa

SEQ ID NO: 272 - DNA, 6941 bp, Homo sapiens
tggaaaacccgaggatgaagcttcaggtagtttttttaagcaaatcgattcttctcccgtaggaggtgaaacagacgagaccactgtgagccagaattaccgtggcagcgtgtcccagccctcaaccccgagccccccgaaacctacaggaatatttcagacaagtgcaaatagttctttcgaaccggtaaaatctcacttagttggggtaaaaccatttgaggcagatcgcgccaacgtggttggtgaagtaagggagacctgtgtccgccagaagcagtgcagaccagctgccgccctgcccgatgcttcccctggcaacctggagcagccaccagacaacatggagaccctctgtgcaccccaggtctgtcccctgcctcttaactccaccacggaagctgtgcacatgcttccgcacgcaggggcaccgcccttggatactgtgtatccagcacccgagaagaggccttcagccaggacccaggggcccgtgaagtgtgagagcccagcaacgactctgtgggcgcaaagtgagctgccagattttggaggcaacgtccttctggcccctgcagccccggcgctttatgtgtgtgcaaaacctcagccacctgttgttcagcctccagaagaggcgatgtccgggcagcagtcacggaacccaagctcggcggccccggtgcagagccgaggtggcattggtgcttctgagaaccttgagaatcctcccaaaatgggagaggaggaggcccttcagtcccaggcgagttctggttatgcaagtttattatcctcaccgcccactgagtctctgcagaatcctccagtcttgattgctcagcctgatcacagctataatctggctcagcccattaacttttctgtgtccttatcgaactctcatgagaagaatcagtcctggagagaggctttggtgggggatagacctgcagtcagcagttgggctctcggtggtgattctggggagaacacttctttgtctgggattccaaccagctctgtccttagcttgtctctgcctagcagtgttgcccaaagtaattttccacaaggttctggtgcttccgaaatggtttctaatcagcctgctaatttgctggttcaaccaccatcccagccagttccagagaacttggttccagaaagtcaaaaggatcgtaaggcaggaagtgctcttcctggatttgctaatagccctgctggaagcacaagtgtggtgttagttccacctgcacacggcaccctggtgcctgatggtaataaggcaaaccattccagtcatcaggaagacacttacggagccctagactttaccttaagcaggactttggaaaatcctgtaaacgtgtacaacccgtcccattctgacagcctcgcttctcagcaaagtgttgccagtcatcccagacaatctgggcctggggcgcctaaccttgaccgtttttatcagcaggtcacgaaagatgcccagggccagcctggcctcgaaagagcccagcaggagctggtgccaccccagcaacaggcttctcccccacaactacccaaagccatgttttcggagctgtcaaatccagaaagtctgcccgcacagggacaggcccagaactcagcacagtcaccagcaagtctggttctggtcgacgcgggtcagcagctgccccctcggcctcctcagtcctctagcgtgtctctggtgtccagtggctccggccaggcagctgtgccgtcagagcagccgtggccacagccagtgcctgcacttgcccccggcccaccgcctcaggacctggccgcctactactactaccggcctttgtacgatgcctaccagcctcagtactctttgccgtacccaccggagcctggcgcagcctccctctattaccaggatgtctacagcctctatgagcctcgatacaggccctatgatggtgctgcgtctgcttacgcccagaactaccgctatcccgagcccgagcggcccagctcccgagccagccactcctcggaacggccacctcccaggcaaggatatcctgaaggatactatagttccaaaagtggatggagcagtcagagcgattactatgcaagctattactccagccagtacgattatggagatccaggtcactgggatcgttaccactacagtgctagagtcagggacccccgcacctatgaccggaggtattggtgtgatgcagagtatgacgcatacaggagagagcactctgccttcggggacaggcccgagaaacgtgacaacaactggaggtacgatcctcgcttcacggggagttttgacgatgaccccgatccgcacagagacccttatggggaagaggtggaccggcgcagcgtccacagcgagcactcggcacggagcctgcacagcgcacacagcctggccagccgccgcagcagcctcagctcccactcgcaccagagtcagatttacagaagccacaatgtggctgccggttcctacgaggccccgcttcctccaggctcctttcacggcgattttgcctacggcacctaccgcagcaatttcagcagtggccccggcttcccagagtatggctaccctgccgacaccgtctggcctgccatggagcaagtttcatcaagaccaacttctcctgaaaaattttcagtgcctcatgtctgtgccaggtttggccctggcggtcagcttatcaaagtgattcccaatctgccttcagaaggacagccggccttggtggaggtccacagcatggaggccttgctgcagcacacgtctgagcaggaggagatgcgggcgttcccgggacccctggccaaagacgacacccataaggtggatgtcattaattttgcacagaacaaagctatgaaatgtttgcagaatgaaaacttaattgacaaagagtctgcaagtcttctttggaattttattgttctcttatgcagacaaaatgggaccgtggtagggaccgacattgcggagcttctgttacgagaccacagaacagtgtggcttcctgggaagtcgcccaatgaagcaaacctgattgatttcacgaatgaggcagtggagcaggtggaagaggaggagtctggtgaggcccagctctctttcctcactggtggtccggcggctgccgccagctcgctcgagagagagaccgagaggttcagggagctgttgctgtatggccgtaagaaggatgctttggagtctgcaatgaagaatggcctgtggggtcacgctctgctacttgcaagtaagatggacagccggacacacgcccgagtcatgaccaggtttgctaacagcctcccaatcaacgaccctctgcagacagtctaccagctcatgtccggacggatgcctgccgcgtccacgtgctgtggagacgagaaatggggagattggaggccgcacctcgccatggtcttgtccaacttgaacaacaacatggacgtcgagtccaggacgatggctaccatgggcgacactctggcttcaaggggcctcttggatgcggcccacttctgctacctcatggcccaggcgggatttggtgtttacacgaagaaaactacaaagcttgtcttaatcggatccaatcacagtttgccattcttaaagttcgcaaccaacgaagcaatccagaggacggaagcctatgagtacgcccagtccctgggtgccgagacctgccccctgcctagtttccaggtgtttaagttcatctactcctgccgcctggcggaaatggggctggccacgcaagccttccactactgtgaggccatcgcgaagagcatcctgacgcagccgcacctgtattccccggtgttgatcagccagcttgtgcagatggcttcccagttacgactcttcgatccccagctgaaagagaagccagaagaggagtccttggccgcacccacgtggctggttcacctgcagcaggtggagcggcagattaaggagggggctggagtatggcatcaggatggagccctcccgcagcagtgtcctggcactccgagttccgagatggagcagttggacaggccaggactcagtcagccaggagccctggggatcgccaaccctctgctggcggtgcctgcaccgagccctgagcactcgagcccgagcgtgcggctgctgccctcagctccgcagacgctccctgacggcccattggccagtcctgccagagtgccgatgttcccagtgccactgcccccggggcccctggagccgggtcctggctgtgtgaccccagggcctgcacttggcttcctggagccctccgggcctggcctcccacctggtgtgccacctctgcaggaaaggagacacttgctccaggaagccaggagcccagacccagggatagtgccgcaggaggcgcctgttggaaactcactttccgagctaagcgaagaaaattttgatggaaaatttgctaatctgaccccctcgaggacggtgccagactcggaggcccccccagggtgggatcgtgccgactcgggtcccacgcagccacctctgtctctctcacccgctcccgaaacaaagagacccggacaggcagccaagaaagaaacgaaggaacctaagaagggtgaatcctggttctttcgttggctacctggaaagaaaaagacagaagcttatttgccagatgacaagaacaaatcgattgtttgggatgaaaagaaaaaccagtgggtgaatttaaatgagccagaagaggagaagaaagccccgcccccacctccaacctcgatgcccaagactgtgcaagctgccccgcctgccctcccagggcctcctggagcccccgtgaacatgtactctagaagagcagcaggaaccagagctcgctacgttgacgtcctgaacccaagcgggacccagcggagcgagccggctctcgctcctgcggactttgtcgctccactcgcgccactcccaattccttctaacttgttcgtgccaaccccagatgcagaagaaccacagcttccagacgggactggcagggaagggcctgcagcagctaggggcctggccaatccagagcctgccccagagcccaaggctcctggcgacctccctgctgcagggggccctcccagcggggccatgcccttctacaaccctgctcagctggcacaggcctgcgccacctccgggagctcaaggctagggaggattggccagaggaagcacctggtgctgaactaggcttgccctgctgtgaacttgcacttggagccctgacgctgctgttctccccgaagaacccgaccgacctccgcgatctccgtcccgcccccagggagacacagcagtgactcagagctggtcgcacactgtgcctccctcctcaccgcccatcgtaatgaattattttgaaaattaattccaccatcctttcagattctggatggaaagactgaatctttgactcagaattgtttgccgaaaagaatgatgtgactttcttagtcatttaggatgatttaaggatatagtattcctggtcatttaagaatgttcattcattgaagccggagctgtctctgccacgggagagccacatggtcggtagtaaccagggcctctccaagcccagctgtgagtcactgcccagtgagtcccgcgcttcctttaaggtgctgggagcaaagagagggtgactgaggcagaccccaacccctgctctgcaccatctgggccctcgccgtgtttgaacctggctgaatgagtggagggcgctgtgttctcaatcagcgcctccgaggagccgtggggttccttcggcattagttcacggtttttgagagaggccctagttactgcagtgaatttctttcctgttgcagagacgcttccagcctcactttactttctgtggcctgatgaggaccatgggtgattttgtgtacccaaagcgctggggactgcccaccgtgtggcccagtcactgggaaggagccccagagagccggctgtctgacatgatggctcagggtggtcatccaggttgaaaactgaccgtgtgatgtttgatttgggcttcatttcgtgtgtaggagcacggttagactcactgttaaggaagctggatgcacttctctaaaaggctgcactttccgtgagcacttttcgtggtacaatccacatgacccactttctcccctgggggacgttggttcagaggttggtagcacttggggagagtatcttaacacagtttcttgacagcagctctggaacttagtatttctgccccgagttttgccacactgagactttgagtagctcctggtggactcaaccctgttcaactcagagacgggcctcctctcactgatgcaaagctttaaggcttctctgactgttctgaaactcttcgtattcttgtcaagtctaaagagactgaagaaaagatttaaatactaataaaaatcagtagataatttctgtaggttctgctggaggaatacaaactgtttggtgttttaaatttaagtgtagaaattgtagaatgtggaattagcacagatccttcctggctttctgtttcacttgatcatttagcccagaccacccaggatgttttccaaaatgttccacaggcgtgtcccgctggatccatttgtccttgtcacttggagaaaggccagtccctgtgacggggcagccctctctgtccctcggtcagctcgtgtgaatcctgggacctcttccggtcggctctgcccgctgttctggggtcgactgccacgacttttgattcaagaagcttcctccaggcgggagcggctatttttcctaaatgagaattgttacattgcaaattgttgaataaaatattttgcgctccttcaagcac

SEQ ID NO: 273 - DNA, 611 bp, Homo sapiens
acttcaccatgcaatttgtgtcttcctaaagagagctgtacccagagagtcctgtgctgaatgtggactcaatccctagggctggcagaaagggaacagaaaggtttttgagtacggctatagcctggactttcctgttgtctacaccaatgcccaactgcctgccttagggtagtgctaagaggatctcctgtccatcagccaggacagtcagctctctcctttcagggccaatccccagcccttttgttgagccaggcctctctcacctctcctactcacttaaagcccgcctgacagaaaccacggccacatttggttctaagaaaccctctgtcattcgctcccacattctgatgagcaaccgcttccctatttatttatttatttgtttgtttgttttgattcattggtctaatttattcaaagggggcaagaagtagcagtgtctgtaaaagagcctagtttttaatagctatggaatcaattcaatttggactggtgtgctctctttaaatcaagtcctttaattaagactgaaaatatataagctcagattatttaaatgggaatatttataaatgagcaaatatcatactgttcaatggttc

SEQ ID NO: 274 - DNA, 129 bp, Homo sapiens
aatgtatgcgccagggtgcttccgtggggcatgagaatttcccgggccatccaagcccaaggacctgggataaactgggagaactatggcagctacttgcatcgacttgtacctcacttagcccttggg

SEQ ID NO: 275 - DNA, 570 bp, Homo sapiens
  misc_feature (481)..(481): Each "n" represents a nucleotide selected from a, t, g or c, or contains no nucleotide.
agcggccgctcgcgatctagaggctgactattcctaggctacagccacacctcattgctgccttttctcccagttcaaagcctccttcacatcctccccttatatctccccaccttaacccacaagtataagacacctctactccctccttagtgaccgatcatgcaccccttaccatcccattaaaacctaatcactcttaccccgctcaatcccaatatcccatcccacagcatgctttgaaaagattaaagcctgttatcacttacctgttacagcatggccttttaaagcctataaactcttcttgccattcccccattttacctgtcctaaaaccagacaaggcttacaggttagttcagaatctgtgccttatcaaccaaattgttttgcctatcaaccccatggtgccaaacccatatactctcctatcctcaatacctgcctctataaccaattattctcttctagatctcanacatgctctctttactattcctttgcacccttaataccagcctctcttcactgtcacttggactgaccctgacacccatcaagctcagc

SEQ ID NO: 276 - DNA, 5191 bp, Homo sapiens
gaattcagtaacccaggcattattttatcctcaagtcttaggttggttggagaaagataacaaaaagaaacatgattgtgcagaaacagacaaacctttttggaaagcatttgaaaatggcattccccctccacagtgtgttcacagtgtgggcaaattcactgctctgtcgtactttctgaaaatgaagaactgttacaccaaggtgaattatttataaattatgtacttgcccagaagcgaacagacttttactatcataagaacccttccttggtgtgctctttatctacagaatccaagacctttcaagaaaggtcttggattcttttcttcaggacactaggacataaagccacctttttatgatttgttgaaatttctcactccatcccttttgctgatgatcatgggtcctcagaggtcagacttggtgtccttggataaagagcatgaagcaacagtggctgaaccagagttggaacccagatgctctttccactaagcatacaactttccattagataacacctccctcccaccccaaccaagcagctccagtgcaccactttctggagcataaacataccttaactttacaacttgagtggccttgaatactgttcctatctggaatgtgctgttctctttcatcttcctctattgaagccctcctattcctcaatgccttgctccaactgcctttggaagattctgctcttatgcctccactggaattaatgtcttagtaccacttgtctattctgctatatagtcagtccttacattgctttcttcttctgatagaccaaactctttaaggacaagtacctagtcttatctatttctagatcccccacattactcagaaagttactccataaatgtttgtggaactgatttctatgtgaagacatgtgccccttcactctgttaactagcattagaaaaacaaatcttttgaaaagttgtagtatgcccctaagagcagtaacagttcctagaaactctctaaaatgcttagaaaaagatttattttaaattacctccccaataaaatgattggctggcttatcttcaccatcatgatagcatctgtaattaactgaaaaaaaataattatgccattaaaagaaaatcatccatgatcttgttctaacacctgccactctagtactatatctgtcacatggtctatgataaagttatctagaaataaaaaagcatacaattgataattcaccaaattgtggagcttcagtattttaaatgtatattaaaattaaattattttaaagatcaaagaaaactttcgtcatactccgtatttgataaggaacaaataggaagtgtgatgactcaggtttgccctgaggggatgggccatcagttgcaaatcgtggaatttcctctgacataatgaaaagatgagggtgcataagttctctagtagggtgatgatataaaaagccaccggagcactccataaggcacaaactttcagagacagcagagcacacaagcttctaggacaagagccaggaagaaaccaccggaaggaaccattctcactgtgtgtaaacatgacttccaagctggccgtggctctcttggcagccttcctgatttctgcagctctgtgtgaaggtaagcacatctttctgacctacagcgttttcctatgtctaaatgtgatccttagatagcaaagctattcttgatgctttggtaacaaacatcctttttattcagaaacagaatataatcttagcagtcaattaatgttaaattgaagatttagaaaaaactatatataacacttaggaaatataaaggtttgatcaatatagatattctgcttttataatttataccaggtagcatgcatatatttaacgtaaataagtaatttatagtatgtcctattgagaaccacggttacctatattatgtattaatattgagttgagcaaggtaactcagacaattccactccttgtagtatttcattgacaagcctcagatttgtcattaattcctgtctggtttaaagataccctgattatagaccaggcatgtataacttatttatatatttctgttaattctttctgaaggcaatttctatgctggagagtcttagcttgcctactataaataacactgtggtatcacagaggattatgcaatattgaccagataaaaataccatgaagatgttgatattgtacaaaaagaactctaactcttatataggaagttgttcaatgttgtcagttatgactgttttttaaaacaaagaactaactgaggtcaagggctaggagatattcaggaatgagttcactagaaacatgatgccttccatagtctccaaataatcatattggaattagaaggaagtagctggcagagctgtgcctgttgataaaatcaatccttaatcactttttcccccaacaggtgcagttttgccaaggagtgctaaagaacttagatgtcagtgcataaagacatactccaaacctttccaccccaaatttatcaaagaactgagagtgattgagagtggaccacactgcgccaacacagaaattatgtaagtactttaaaaaagattagatattttgttttagcaaacttaaaattaaggaaggtggaaatatttaggaaagttccaggtgttaggattacagtagtaaatgaaacaaaacaaaataaaaatatttgtctacatgacatttaaatatggtagcttccacaactactataaatgttattttggacttagactttatgcctgacttaaggaatcatgatttgaatgcaaaaactaaatattaatctgaaccatttctttcttatttcagtgtaaagctttctgatggaagagagctctgtctggaccccaaggaaaactgggtgcagagggttgtggagaagtttttgaagaggtaagttatatattttttaatttaaatttttcatttatcctgagacatataatccaaagtcagcctataaatttctttctgttgctaaaaatcgtcattaggtatctgcctttttggttaaaaaaaaaggaatagcatcaatagtgagtttgttgtacttatgaccagaaagaccatacatagtttgcccaggaaattctgggtttaagcttgtgtcctatactcttagtaaagttctttgtcactcccagtagtgtcctattttagatgataatttctttgatctccctatttatagttgagaatatagagcatttctaacacatgaatgtcaaagactatattgacttttcaagaaccctactttccttcttattaaacatagctcatctttatatttttaattttattttagggctgagaattcataaaaaaattcattctctgtggtatccaagaatcagtgaagatgccagtgaaacttcaagcaaatctacttcaacacttcatgtattgtgtgggtctgttgtagggttgccagatgcaatacaagattcctggttaaatttgaatttcagtaaacaatgaatagtttttcattgtaccatgaaatatccagaacatacttatatgtaaagtattatttatttgaatctacaaaaaacaacaaataatttttaaatataaggattttcctagatattgcacgggagaatatacaaatagcaaaattgggccaagggccaagagaatatccgaactttaatttcaggaattgaatgggtttgctagaatgtgatatttgaagcatcacataaaaatgatgggacaataaattttgccataaagtcaaatttagctggaaatcctggatttttttctgttaaatctggcaaccctagtctgctagccaggatccacaagtccttgttccactgtgccttggtttctcctttatttctaagtggaaaaagtattagccaccatcttacctcacagtgatgttgtgaggacatgtggaagcactttaagttttttcatcataacataaattattttcaagtgtaacttattaacctatttattatttatgtatttatttaagcatcaaatatttgtgcaagaatttggaaaaatagaagatgaatcattgattgaatagttataaagatgttatagtaaatttattttattttagatattaaatgatgttttattagataaatttcaatcagggtttttagattaaacaaacaaacaattgggtacccagttaaattttcatttcagatatacaacaaataattttttagtataagtacattattgtttatctgaaattttaattgaactaacaatcctagtttgatactcccagtcttgtcattgccagctgtgttggtagtgctgtgttgaattacggaataatgagttagaactattaaaacagccaaaactccacagtcaatattagtaatttcttgctggttgaaacttgtttattatgtacaaatagattcttataatattatttaaatgactgcatttttaaatacaaggctttatatttttaactttagtgtttttatgtgctctccaaattttttttactgtttctgattgtatggaaatataaaagtaaatatgaaacatttaaaatataatttgttgtcaaagtaatcaagtgtttgtcttttttttagttttagcttattgggattctctttgtttatatttaaaattatactttgatttagaaaacataaatgcttccccttagcattttgttatggaaaattacaaacttttatttttagaaaacagaactcctttccagaaataggttacaaacagtagtgtcctccacagaatgttggaaatgttttcaactccccactgtatactatcttgctaataagtctgtcttcagatttcgattaaccggtttgtatgtctgtgcactttagcatagctggacattaaagaggaaagagagtacatattataagttgcttatcagtaactgaggagtaaaactgataaatgtgaggcaaagaagtttaaaatatggttaaagcctaagcatatttgcaaacaaatcaaacaatactctgagaagtaaaaacataattatttaattaacaaatttcagtggataaattttataacaaattagacacagttgaaaataaaattagaaaactagaaaatagaacaaaagaaacttctggaattca

SEQ ID NO: 277 - DNA, 51 bp, Homo sapiens
caagggggtcaacgtctcagccaatcaggatgatgaactagcccacgagac

SEQ ID NO: 278 - DNA, 615 bp, Homo sapiens
gaattccggccatgaagacccaaaggaatggccactccctggggcggtggtcactggtgctcctgctgctgggcctggtgatgcctctggccatcattgcccaggtcctcagctacaaggaagctgtccttcgtgctatagatggcatcaaccagcggtcctcggatgctaacctctaccgcctcctggacctggaccccaggcccacgatggatggggacccagacacgccaaagcctgtgagcttcacagtgaaggagacagtgtgccccaggacgacacagcagtcaccagaggattgtgacttcaagaaggacgggctggtgaagcggtgtatggggacagtgaccctcaaccaggccaggggctcctttgacatcagttgtgataaggataacaagagatttgccctgctgggtgatttcttccggaaatctaaagagaagattggcaaagagtttaaaagaattgtccagagaatcaaggattttttgcggaatcttgtacccaggacagagtcctagtgtgtgccctaccctggctcaggcttctgggctctgagaaataaactatgagagcaatttcaaaaaaaaaaaaaaaaaaaaaccggaattc

SEQ ID NO: 279 - DNA, 600 bp, Homo sapiens
actaactgctagaagagaagactctgggttatactggtgcgaggctgccacagaggatggaaatgtccttaagcgcagccctgagttggagcttcaagtgcttggcctccagttaccaactcctgtctggtttcatgtccttttctatctggcagtgggaataatgtttttagtgaacactgttctctgggtgacaatacgtaaagaactgaaaagaaagaaaaagtgggatttagaaatctctttggattctggtcatgagaagaaggtaatttccagccttcaagaagacagacatttagaagaagagctgaaatgtcaggaacaaaaagaagaacagctgcaggaaggggtgcaccggaaggagccccagggggccacgtagcagcggctcagtgggtggccatcgatctggaccgtcccctgcccacttgctccccgtgagcactgcgtacaaacatccaaaagttcaacaacaccagaactgtgtgtctcatggtatgtaactcttaaagcaaataaatgaactgacttcaactgggatacatttggaaatgtggtcatcaaagatgacttgaaatgaggcctactctaaagaat

SEQ ID NO: 280 - DNA, 1487 bp, Homo sapiens
gtggagaagtgtgagaagatgaatggaccggtggatggcttgtgtgaccactctctaagtgaaggagtcttcatgttcacatcggagtctgtgggagagggacacccggataagatctgtgaccagatcagtgatgcagtgctggatgcccatctcaagcaagaccccaatgccaaggtggcctgtgagacagtgtgcaagaccggcatggtgctgctgtgtggtgagatcacctcaatggccatggtggactaccagcgggtggtgagggacaccatcaagcacatcggctacgatgactcagccaagggctttgacttcaagacttgcaacgtgctggtggctttggagcagcaatccccagatattgcccagtgcgtccatctggacagaaatgaggaggatgtgggggcaggagatcagggtttgatgttcggctatgccaccgacgagacagaggagtgcatgcccctcaccatcatccttgctcacaagctcaacgcccggatggcagacctcaggcgctccggcctcctcccctggctgcggcctgactctaagactcaggtgacagttcagtacatgcaggacaatggcgcagtcatccctgtgcgcatccacaccatcgtcatctctgtgcagcacaacgaagacatcacgctggaggagatgcgcagggccctgaaggagcaagtcatcagggccgtggtgccggccaagtacctggacgaagacaccgtctaccacctgcagcccagtgggcggtttgtcatcggaggtccccagggggatgcgggtgtcactggccgtaagattattgtggacacctatgcggcctggggggctcatggtggtggggccttctctgggaaggactacaccaaggtggaccgctcagccgcatatgctgcccgctgggtggccaagtctctggtgaaagcagggctctgccggagagtgcttgtccaggtttcctatgccattggtgtggccgagccgctgtccatttccatcttcacctacggaacctctcagaagacagagcgagagctgctggatgtggtgcataagaacttcgacctccggccgggcgtcattgtcagggacttggatttgaagaagcccatctaccagaagacagcatgctacggccatttcggaagaagcgagttcccatgggaggttcccaggaagcttgtattttagagccagggggagctgggcctggtctcaccctggaggcaactggtggccatgctcctcttccccagacgcctggctgctgatcgccttccccacccaccaaccctcagggcaaagccaggtccctctcatttagcctgtcctgtcatcatcatggccagctggaggcaggggcttcctggtgctggaggttggatcttgatgtaaggatgggcatggtgttctcctgctgctccctcagactggggcaatgttaatttagtggaaaaggcacccccgtcaag

SEQ ID NO: 281 - DNA, 2084 bp, Homo sapiens
ggaactgcaaccatggtgcccagcttcctctccctgagcttctcctccttgggcctgtgggcttctgggctgatcttggtcttaggctttctcaagctcatccacctgctgctgcggaggcgaacgttggctaaggctatggacaaattcccagggcctcccacccactggctttttggacatgccctcgagatccaggagacggggagcctggacaaagtggtgtcctgggcccaccagttcccgtatgcccacccactctggttcggacagttcattggcttcctgaacatctatgagcctgactatgccaaagctgtgtacagccgtggggaccctaaggcccctgatgtgtatgacttcttcctccagtggattgggagaggcctgctggttcttgaggggcccaagtggttgcagcaccgcaagctgctcacacctggctttcattatgatgtgctgaagccctatgtggccgtgttcactgagtctacacgtatcatgctggacaagtgggaagagaaagctcgggagggtaagtcctttgacatcttctgcgatgtgggtcacatggcgctgaacacactcatgaagtgcacctttggaagaggagacaccggcctgggccacagggacagcagctactaccttgcagtcagcgatctcactctgttgatgcagcagcgccttgtgtccttccagtaccataatgacttcatctactggctcaccccacatggccgccgcttcctgcgggcctgccaggtggcccatgaccatacagaccaggtcatcagggagcggaaggcagccctgcaggatgagaaggtgcggaagaagatccagaaccggaggcacctggacttcctggacattctcctgggtgcccgggatgaagatgacatcaaactgtcagatgcagacctccgggctgaagtggacacattcatgtttgaaggccatgacaccaccaccagtggtatctcctggtttctctactgcatggccctgtaccctgagcaccagcatcgttgtagagaggaggtccgcgagatcctaggggaccaggacttcttccagtgggatgatctgggcaaaatgacttatctgaccatgtgcatcaaggagagcttccgcctctacccacctgtgccccaggtgtaccgccagctcagcaagcctgtcacctttgtggatggccggtctctacctgcaggaagcctgatctctatgcatatctatgccctccataggaacagtgctgtatggcccgaccctgaggtctttgactctctgcgcttttccactgagaatgcatccaaacgccatccctttgcctttatgcccttctctgctgggcccaggaactgcattgggcagcagtttgccatgagtgagatgaaggtggtcacagccatgtgcttgctccgctttgagttctctctggacccctcacggctgcccatcaagatgccccagcttgtcctgcgctccaagaatggctttcacctccacctgaagccactgggccctgggtctgggaagtagctctgatgagaatggggtcccagatggctcaggctgtgacctccctgggcaccaccctccccaggctgggtgtggaggagttggggccccctgccttcaggaggcttgtagtttagaagggaagtaggcattaccatagacgactcctagaggacagtgctatgtaaaaatgtgtgtctataaatgtttatcatgcatgtattctagagctcattcatttattcaacaaacatttggtgagcacctatttcggttcgagaaacttcatttatctcctataattggcaaacttaaaaatgcagcagaaacttacattccaaccttagagactcatagtgagcacaaggaaagttttgccctgagattcatggttatggctgggtaccaccaaatagaagaatggcttaggggagtgccccttcactgagatgtgtttctttgttgaactttgtgtgtgtgtgtttagaatataacagacataagaaaaaattacctaaatgaagactgtacaaaataataaataattctgaagcaga

SEQ ID NO: 282 - DNA, 387 bp, Homo sapiens
ctttgataaccacctctgagaccccctcacacagtactcccagcttcacttcttcgatcaccaccaccgaggccccctcaagcagtactcccagcttcacttcttcgatcaccaccaccgactcgatcgtcaccaccgagaccacataccacagtactcccagcttcacttctttgatcaccatcactgagaccacctcacacagtactcccagctacactacctcaatcaccagcaccaagaccccctcacacagtactcccagctacactacctcaatcaccaccactgagatcccatcacacagtactcccagcttcacttcttcaatcatcaccaccgagaccacatcccacagtactcccagcttcacttcttctatgttcc

SEQ ID NO: 283 - DNA, 773 bp, Homo sapiens
  misc_feature (1)..(771): Each "n" represents a nucleotide selected from a, t, g or c, or contains no nucleotide.  The "n" residue at position 78 is "t" according to B7 gene sequence in the Entrez human genome sequence database.
ntnnnnnnnnttnnnttactctgtgtcagtaatctggttataagcaaaactagcaatctgcaggtagggcagttcatncatctgggcacttcgcagccgattgccatcagccttgagccagagcaggtgggtgaggtagttgagtggagacaggtctgtcaggtggttctcagaaatatccacatagcgcagatggatgtaggagcgcagcaagtagatgtctgtcaggtccctctctttaacctccagcttgacataagcatgagccagcccattgcctgtcttacagagcagagaaagcccttcccttcatcatgtcctccgtgaggggggtgggcagccattcctcaagggaactcttccccctcttttcttgtagtcctcccccctcctctgtctccttcttcggcctcttctttctcaagaatcatccnggncttggntcaagagtcttccttagatcaactttnatcttacttcccagaggccgnnnttcaanttggttaccagttatnaannnnnnnnnnnnnnnnnnnnnnnnnnnnnnnnnnnnnnnnnnnnnnnnnnnnnnnnnnnnnnnnnnnnnnnnnnnnnnnnnnnnnnnnnnnnnnnnnnnnnnnnnnnnnnnnnnnnnnnnnnnnnnnnnnnnnnnnnnnnnnnnnnnnnnnnnnnnnnnnnnnnnnnnnnnnnnnnnnnnnnnnnnnnnnnnnnnnnnnnnnnnnnnnnnnnnnnnnnnnnnnnnnnnnnnnnnnnnnnnnnnnnnnnnnnnnntt

SEQ ID NO: 284 - DNA, 821 bp, Homo sapiens
ggtactcaacactgagcagatctgttctttgagctaaaaaccatgtgctgtaccaagagtttgctcctggctgctttgatgtcagtgctgctactccacctctgcggcgaatcagaagcaagcaactttgactgctgtcttggatacacagaccgtattcttcatcctaaatttattgtgggcttcacacggcagctggccaatgaaggctgtgacatcaatgctatcatctttcacacaaagaaaaagttgtctgtgtgcgcaaatccaaaacagacttgggtgaaatatattgtgcgtctcctcagtaaaaaagtcaagaacatgtaaaaactgtggcttttctggaatggaattggacatagcccaagaacagaaagaaccttgctggggttggaggtttcacttgcacatcatggagggtttagtgcttatctaatttgtgcctcacctggacttgtccaattaatgaagttgattcatattgcatcatagtttgctttgtttaagcatcacattaaagtgaaactgtattttatgttatttatagctgtaggttttctgtgtttagctatttaatactaattttccataagctattttggtttagtgcaaagtataaaattatatttgggggggaataagattatatggactttcttgcaagcaacaagctattttttaaaaaaaactatttaacattcttttgtttatattgttttgtctcctaaattgttgtaatgtcattataaaataagaaaaatattaataagacaaatattgaaaataaagaaacaaaaagtgcttctgttaaaaaaaaa

SEQ ID NO: 285 - DNA, 1740 bp, Homo sapiens
gaattccgggctgcagtcacagaatggaaatctgcagaggcctccgcagtcacctaatcactctcctcctcttcctgttccattcagagacgatctgccgaccctctgggagaaaatccagcaagatgcaagccttcagaatctgggatgttaaccagaagaccttctatctgaggaacaaccaactagttgctggatacttgcaaggaccaaatgtcaatttagaagaaaagatagatgtggtacccattgagcctcatgctctgttcttgggaatccatggagggaagatgtgcctgtcctgtgtcaagtctggtgatgagaccagactccagctggaggcagttaacatcactgacctgagcgagaacagaaagcaggacaagcgcttcgccttcatccgctcagacagtggccccaccaccagttttgagtctgccgcctgccccggttggttcctctgcacagcgatggaagctgaccagcccgtcagcctcaccaatatgcctgacgaaggcgtcatggtcaccaaattctacttccaggaggacgagtagtactgcccaggcctgcctgttcccattcttgcatggcaaggactgcagggactgccagtccccctgccccagggctcccggctatgggggcactgaggaccagccattgaggggtggaccctcagaaggcgtcacaacaacctggtcacaggactctgcctcctcttcaactgaccagcctccatgctgcctccagaatggtctttctaatgtgtgaatcagagcacagcagcccctgcacaaagcccttccatgtcgcctctgcattcaggatcaaaccccgaccacctgcccaacctgctctcctcttgccactgcctcttcctccctcattccaccttcccatgccctggatccatcaggccacttgatgacccccaaccaagtggctcccacaccctgttttacaaaaaagaaaagaccagtccatgagggaggtttttaagggtttgtggaaaatgaaaattaggatttcatgatttttttttttcagtccccgtgaaggagagcccttcatttggagattatgttctttcggggagaggctgaggacttaaaatattcctgcatttgtgaaatgatggtgaaagtaagtggtagcttttcccttctttttcttctttttttgtgatgtcccaacttgtaaaaattaaaagttatggtactatgttagccccataattttttttttccttttaaaacacttccataatctggactcctctgtccaggcactgctgcccagcctccaagctccatctccactccagattttttacagctgcctgcagtactttacctcctatcagaagtttctcagctcccaaggctctgagcaaatgtggctcctgggggttctttcttcctctgctgaaggaataaattgctccttgacattgtagagcttctggcacttggagacttgtatgaaagatggctgtgcctctgcctgtctcccccaccaggctgggagctctgcagagcaggaaacatgactcgtatatgtctcaggtccctgcagggccaagcacctagcctcgctcttggcaggtactcagcgaatgaatgctgtatatgttgggtgcaaagttccctacttcctgtgacttcagctctgttttacaataaaatcttgaaaatgccaaaaaaaaaaaaaaaaaaaccggaatcccggccggaattc

SEQ ID NO: 286 - DNA, 6126 bp, Homo sapiens
cagacaaggacagaaagggggctggaggagaaagagagagagagatacagagagagagagagagagagagagagagagagagagagagatcagccctggtgagggaggaaaactccatagataatacagggagctcctgcaggaagactcagggagaagatcccagaacttaccctaagactgttgagagagtagggggtagctttgcaggacctggtttgggggtcatcaagcagtaacggttactgcacaggcgttgccactgagccagagccatttaacccgacctgtgtggctggggatcaagcttcagataccccataactctgactctcagactgttttgggggccccgtggctgcagacaagggaaggaggggcacgtgagggctgggtccctgcctccccccgtcctccgctgtcactcactaccccaacagtcgcccagggggcgggccccggagaggtggggatgggggagggtaatcttggcaggcgcctgctgcatggcgtaggtagggactattgaggggggcggacgccgagggggtgaacacgagtgggaagctaagagagacacggggagggggaggggaccgggaaccatttgaatgagaggaggggatcacgggtagagtgggctccaggaggtagggcgagcagggtgtgacgggggccagactcttgagccaggtaaggggagcagtacatatccagccatactcatggaccccagtgatttccccagtccatttgacccattgaccctgccagagaagcccctggctggagacctaccagtagacatggaatttggagaggatctactggaatcccagactgccccaactcgaggatgggccccccctggcccttctccatcctcgggagccctggacctgcttgatacccctgctggcctggaaaaagaccctggagtcctggatggagccactgagttgctggggctgggggggctgctctataaagccccctctcccccggaggtggaccacggtcctgagggaaccctggcatgggatgcaggagatcagaccctagagcctggaccagggggccagacccctgaggtggtaccacctgatccaggggctggggcaaattcctgttcacctgaggggctactagagcctttggctccagattctccaataacactgcagtccccacatattgaagaggaggagaccacctccatagctactgcaagaaggggctcccctgggcaggaggaggagcttccccaagggcagccacagagcccaaatgccccgcctagcccttcagtgggagagactctgggggatggaatcaacagttctcagaccaaacctgggggctctagcccccctgcacatccttccttgccaggagatggcctgactgcgaaggcgagtgagaagccgcctgaacggaagagaagcgagcgcgttaggagagcagaacctccaaaacctgaggttgtagattccactgagagcattccagtgtcagatgaggattctgatgccatggtagatgaccccaatgatgaggactttgtgccattccggccccggcgctctcctcgcatgtccctacgctcaagtgtgtcacaaagggccgggcgctctgcagtgggcaccaagatgacttgtgcacattgccggacaccactgcagaaggggcagactgcctatcagcgcaaggggctgcctcagctcttctgctcgtcatcctgcctcaccactttctccaagaagccctcgggcaaaaagacctgtaccttctgcaagaaggagatctggaacaccaaggactcggttgtggcgcagactggttctggaggctccttccatgagttctgcacatccgtctgtctctccctgtatgaggcccagcagcagcgcccgatcccccagtctggggatcccgccgacgctactcgctgcagcatatgccagaagactggagaggtcctgcacgaggtcagcaatggcagcgtggtacaccggctctgcagcgattcttgcttctccaaattccgggccaacaagggactgaaaaccaactgttgtgaccagtgtggggcttacatctacaccaagaccgggagtcctggccctgagctcctcttccacgagggccaacaaaagcggttctgcaacacaacctgcttgggggcgtacaagaagaaaaacacacgtgtgtacccatgtgtctggtgcaagaccctgtgtaagaactttgagatgctatcacatgtggatcgtaatggcaagaccagcttgttctgttccctgtgctgtaccacttcttacaaagtgaagcaggcagggctcactggccctccccgaccctgcagcttctgccgccgcagcctctctgacccctgttactacaacaaggttgaccgcacagtctaccagttctgcagccccagctgctggaccaagttccagcgcacaagccctgaggggggcattcacctgagctgtcactactgtcacagcctcttcagtggcaagcctgaggtcttggactggcaggaccaagtgttccagttctgctgccgtgattgctgtgaggacttcaagcggcttcggggtgtggtgtcccagtgtgagcactgtcggcaggagaaactcttgcatgagaaactccgattcagcggagtggagaaaagcttctgcagcgaaggctgtgtgctgctgtacaaacaggacttcactaagaagctgggcttgtgctgtatcacttgtacttactgctcccagacctgccagcgcggagtcaccgagcaactggatggcagcacctgggacttctgcagtgaggactgtaagagcaagtacctgctgtggtactgcaaggctgcccggtgccatgcgtgtaagcgccaggggaagctgctggagaccatccactggcgtgggcagatccgtcatttctgcaaccagcagtgtcttctgcgtttctatagccagcagaaccaacccaacctggatacccagagtgggcccgagagcctcctgaacagtcagtctcctgagtcaaaaccccagacaccctctcaaaccaaagtggagaacagcaacacaatccctgtgaagacccgatcagctcccactgctcccacccctccacccccaccacccccagcaacaccccgcaaaaacaaggctgccatgtgtaagccactgatgcagaatcggggcgtctcctgcaaggtggagatgaagtccaaaggaagtcaaacagaagagtggaagccacaggtgatcgtgctgcccatcccagtgcccatcttcgtgccagtgcctatgcatctgtactgccagaaagtcccggtgcctttctcgatgcctatcccggtgcctgtgcccatgttcttgcccactaccttggagagcacagacaagattgtagagaccattgaggagctgaaggtgaagatcccttccaaccccttggaggccgacatcctggctatggcagaaatgattgcagaggctgaggagttagacaaggcctcatctgacctttgtgatcttgtgagcaaccagagtgcagagggactcctggaagactgtgacctgtttgggcctgctcgagatgatgtcctggccatggcagtcaagatggccaatgtcttggatgagcctgggcaagacttggaggcagacttccctaagaatcctctggacattaatcccagtgtagacttcctctttgattgtggcctggtagggcctgaggatgtgtctactgaacaagaccttccccgaaccatgaggaagggtcaaaagcggctggtgctttccgaaagctgctcccgggactccatgagcagtcagcctagttgtaccgggctcaactattcatatggtgtcaatgcttggaagtgctgggtgcagtcaaaatatgccaatggagaaaccagcaagggtgatgagctgcgctttggccccaaacccatgcgtatcaaagaggatattctcgcctgctcagctgctgagctcaactacggtctggcccagtttgtgagagaaatcactcggcccaatggtgaacgatatgaacctgacagtatctactatttgtgtcttggcatccagcagtacttgctggaaaataaccggatggtgaacattttcacggacctttactacctgacttttgttcaagaactcaacaagtctctgagtacctggcagcccacactcctccccaacaatacggtgttctctcgagtggaggaggagcacctctgggagtgtaagcaactgggggtctactcgccctttgtcctcctcaacaccctcatgttcttcaacactaagttttttgggctgcagacagctgaggaacacatgcaactctccttcaccaatgtggtgcggcagtcccgcaagtgtaccacccctcggggcaccaccaaggtggtgagcatccgctactatgccccagtccgccagaggaaagggcgagacacgggtcctggaaaacggaagagagaagatgaagcccctatcttagagcagcgtgagaaccgcatgaatcccctccgctgccctgtcaagttctatgaattctatctctcaaaatgtcctgaaagcctccggactcgcaacgatgtgttctacctgcaacctgaacggtcctgcatcgccgagtcacctctctggtattctgtgatccccatggaccgcagcatgttggagagcatgctcaatcgcatcctggctgtgcgcgagatttatgaggaactgggtcgtcctggggaggaagacctggactgagctcgtgtgccatccatatccatctttcacatcaatgtctgtcctgtggccatgtccctcagggtgacaggcccaggaaccaatgctactcattctgaagggccctgactgctcctttccgctcacccattccctgccttctctaggaaccctggcttttatcttcttccgtaccacttgacaaccatggggccctggtcttctgtactcaggggctggtctcccagtgatgggcaaaagccagcttgcccgttttctttatgcttcagagtaaacccctccttctgggtccagactctgggtggagtgttaatagctctggtgatcctgttggctttgggtttcctgacccatcccgcataggtagagcctcttgttcctaggcatgacctagggaaaaacccagctgccttctctgccctgtgcccactcccttctctactcttccccagcaccatgccaaaaggtcttatctgaaaggtaagaaataaacaatgaaagcgatgaggggaccatttacataaaacacagagcttagacactcttcccctcctatgaaataattggttgttggcaccatctcaccaccgcatatccctcaccccctggcaagcaccaatccttggtgctgccgtttttaaaatcttccaaatgcctttttttcctcagaggcagagaatgactaagtacggggagcagactcctgttgtgcagactcctgtccccttggtttctgtgtttgtctctctgccatcttaggttgccatgagccatggtgtcaacatgcttagccccctctgtaactgcctccctttagttcaatggacagacctcccaaggcaaaaactaccttctgacttgggttagaggctgggttcccctctattgttcccctatcataagagctaggccaagcctatgggaccttgagtcatgcaggatgggatctgtggtcaaaggacaggcgaggagctgtgggcgcagggcctgccgccactgcctacatcttctctcttccccatcttgcattggaggtcccagaaaacaattagcttctggcaaagggggtacccacttctttccctgttgactttgctgtttcccaggctcctttttgtgtttttataactgtcaccagttagccactgtttaaattgtatatattgttctgaggcgcctggcctgtcccttcagtgagccatgcccacccttgtgttgtagtgagaagctgttgtcacgactaaccttctgtctctgaaattgtttgtttcaaataaagagttaaaattgaaaaaaaaaaaaaaaaaaaaaataaaaaaaaaaa

SEQ ID NO: 287 - DNA, 232 bp, Homo sapiens
cacaggcctccaggagccgctgggagctgccgccaggagctgtcaccatgacgggggaacttgaggttaagaacatggacatgaagccggggtcaaccctgaagatcacaggcagcatcgccgatggcactgatggctttgtaattaatctgggccaggggacagacaagctgaacctgcatttcaaccctcgcttcagcgaatccaccattgtctgcaactcattggacgg

SEQ ID NO: 288 - DNA, 2274 bp, Homo sapiens
agaggggccccgcgcgcggatctcgcgagagcattagagggcggaagcgctatccgagcaggatgcggttcgtggttgccttggtcctcctgaacgtcgcagcggcgggagccgtgccgctcttggccaccgaaagcgtcaagcaagaagaagctggagtacggccttctgcaggaaacgtctccacccaccccagcttgagccaacggcctggaggctctaccaagtcgcatccggagccgcagactccaaaagacagccctagcaagtcgagtgcggaggcgcagaccccagaagacacccccaacaagtcgggtggggaggcaaagaccctaaaagacagctccaacaagtcgggtgcggaggcacagacccccaaaggcagcactagcaagtcgggttcggaggcgcagaccacaaaagacagcactagtaagtcgcatccggagctgcagactccaaaagacagcactggcaaatcgggtgcggaggcgcagaccccagaagacagccccaacaggtcgggtgcggagccaaagacccaaaaagacagccctagcaagtcaggttcggaggcgcagaccacaaaagatgtccctaataagtcgggtgcggacggccagaccccaaaagacggctccagcaagtcgggtgcggaggatcagaccccaaaagacgtccctaacaagtcgggtgcggagaagcagactccaaaagacggctctaacaagtccggtgcagaggagcagggcccaatagacgggcccagcaagtcgggtgcggaggagcagacctcaaaagacagccctaacaaggtggttccagagcagccttcccggaaagaccattccaagcccatctccaacccttctgataacaaggagctccccaaggctgacacaaaccagcttgctgacaaagggaagctttctcctcatgctttcaaaaccgaatctggggaggaaactgacctcatttctcccccgcaggaggaagttaagtcttcagagcctactgaggatgtggggcccaaagaggctgaagatgatgatacaggacccgaggagggctcaccgcccaaagaagagaaagaaaagatgtccggttctgcctccagtgagaaccgtgaagggacactttcggattccacgggtagcgagaaggatgacctttatccgaacggttctggaaatggcagcgcggagagcagccacttctttgcatatctggtgactgcagccattcttgtggctgtcctctatatcgctcatcacaacaagcggaagatcattgcttttgtcctggaaggaaaaagatctaaagtcacccggcggccaaaggccagtgactaccaacgtttggaccagaagtatgtcttaattctgaatgttttccctgcacctcctaaaagatcttttctcccccaagtcctaacagaatggtatattcctctggaaaaagatgaacgtcaccaatggattgtgctgctctcgtttcagctttgatttttttgtccttgagaaccttgtcctccctgctgatttgtttctaaatcaaaagaaatgaagaaaaaagtactgtgacctgagagacaccctcctctagaatttagtggcgggtctgggctggcagaggtagggggctgctttgggctttgcacctgcactttggtgacattgttcttctgtgttccctttatttatgctggtggcttccatccgttctcctctggggtgagtggaggggtatatggaaacacggctatgaccaaagggagatcccagcctgggcagcctgcgctgctgaccaccctccctggggcccgggctctgtaggaaagttggtccttgactgtggcattgcactctgcactgtttctctctgcagacctaggggaaaactgcaggtggaagtgcttttctactaaggcctcttactttgggggggatgtgccctacagaagacatagaagatggggaaatgccaatgggcaaagagctactttgaatacataattctcttcaaagacttcagcagcaaacctaaacagcaggttaaaaaaaaagatgcttttttgggtgcaagtctaacctgtctagcatgagatcttcttgattttctgattattttatgtagcttgagacaaagtgaatcaacttccacttagttgtaccgagcataaaacagaacttgggcttcctggcagtgaggccactgtcccatcacagatttttaaaataaatatgatttgaagtagtgtgatctttcacacaa

SEQ ID NO: 289 - DNA, 158 bp, Homo sapiens
aaatcaagtgtgtttattgaatggtgattgcctgctttatttcagaggaccagtgctttgatttttattatgctatgttataactgaacccaaataaatacaagttcaaatttatgtagactgtataagattataataaaacatgtctgaagtcaaaa

SEQ ID NO: 290 - DNA, 1594 bp, Homo sapiens
gcccgccggtccacgccgcgcaccgctccgagggccagcgccacccgctccgcagccggcaccatgcgcgagatcgtgcacatccaggcgggccagtgcggcaaccagatcggcgccaagttttgggaggtcatcagcgatgagcatgggatcgaccccacaggcagttaccatggagacagtgacttgcagctggagagaatcaacgtgtactacaatgaggctgctggtaacaaatatgtacctcgggccatcctggtggatctggagcctggcaccatggactctgtcaggtctggacccttcggccagatcttcagaccagacaacttcgtgttcggccagagtggagccgggaataactgggccaagggccactacacagagggagccgagctggtcgactcggtcctggatgtggtgaggaaggagtcagagagctgtgactgtctccagggcttccagctgacccactctctggggggcggcacggggtccgggatgggcaccctgctcatcagcaagatccgggaagagtacccagaccgcatcatgaacaccttcagcgtcatgccctcacccaaggtgtcagacacggtggtggagccctacaacgccaccctctcggtccaccagctggtggaaaacacagatgaaacctactccattgataacgaggccctgtatgacatctgcttccgcaccctgaagctgaccacccccacctacggggacctcaaccacctggtgtcggccaccatgagcggggtcaccacctgcctgcgcttcccgggccagctgaacgcagacctgcgcaagctggcggtgaacatggtgcccttccctcgcctgcacttcttcatgcccggcttcgcgcccctgaccagccggggcagccagcagtaccgggcgctcacggtgcccgagctcacccagcagatgttcgactccaagaacatgatggccgcctgcgacccgcgccacggccgctacctgacggtggctgccatcttccggggccgcatgtccatgaaggaggtggacgagcagatgctcaacgtgcagaacaagaacagcagctacttcgtggagtggatccccaacaacgtgaagacggccgtgtgcgacatcccgccccgcggcctgaagatgtcggccaccttcatcggcaacagcacggccatccaggagctgttcaagcgcatctccgagcagttcacggccatgttccggcgcaaggccttcctgcactggtacacgggcgagggcatggacgagatggagttcaccgaggccgagagcaacatgaacgacctggtgtccgagtaccagcagtaccaggacgccacggccgacgaacaaggggagttcgaggaggaggagggcgaggacgaggcttaaaaacttctcagatcaatcgtgcatccttagtgaacttctgttgtcctcaagcatggtctttctacttgtaaactatggtgctcagttttgcctctgttagaaattcacactgttgatgtaatgatgtggaactcctctaaaaattacagtattgtctgtgaaggtatctatactaataaaaaagcatgtgtag

SEQ ID NO: 291 - DNA, 512 bp, Homo sapiens
  misc_feature (107)..(479): Each "n" represents a nucleotide selected from a, t, g or c, or contains no nucleotide.
tagcaatccaggagaaggtgctggagagggtgaatgccgtcaagaccaaagtggaagctttccagacaaccatttccaagtacttctcagaacgtggggatgctgtngccaaggcctccaaggagactcatgtaatggattaccgggccttggtgcatgagcgagatgaggcagcctatggggagctcagggccatggtgctggacctgagggccttctatgctgagctttatcatatcatcagcagcaacctggagaaaattgtcaacccaaagggtgaagaaaagccatctatgtactgaacccgggactagaaggaaaataaatgatctatatgttgtgtggaaaaaaaaaaaaaaaaaaanaannnnaannnnnnnnnnnnnnnnnnnnnnncctgaagatgaatgtggtgggaaggggtgggtgtcacaaagnnnnnnnnnnnnnnnnnnnnnnnnnnnnnnnnnnnnnnnnnnaagaggggattcaggccctttctcatccagtag

SEQ ID NO: 292 - DNA, 310 bp, Homo sapiens
  misc_feature (194)..(285): Each "n" represents a nucleotide selected from a, t, g or c, or contains no nucleotide.
ttctcaaatatcgtttacacgttggtaactataatggcacagctggagatgcattacgtttcaacaaacattacaaccacgatctgaagtttttcaccactccagataaagacaatgatcgatatccttctgggaactgtgggctgtactacagttcaggctggtggtttgatgcatgtctttctgcaaacttnnnnnnnnnnnnnnnnnnnnnnnnnnacagaggtgtccgtaatgggatttnnnnnnnnnnnnnnnnnnnnnnnagtnaggcacaccctggtngctacaagtcctccttcaaagaggc

SEQ ID NO: 293 - DNA, 580 bp, Homo sapiens
  misc_feature (44)..(524): Each "n" represents a nucleotide selected from a, t, g or c, or contains no nucleotide.
ctgtctacctgagagaatgagcacccctcatccatctcagcatnnnnnnnnnnnnnnnnnnnnnnnnnnnnnacctcaggactnaacgccacacctcaggattcctcctccttgaatctgnnnnnnnnnnnnnnnnntgagatgnnnnnnaaggtaagatgccgcatcacnnggcacgccgcccctgacagctgccttgataccagctctctgtggaaacccccgaggagttggatctggagaacagctgggcctcctnnnnnnnnnnnnnnnnnnnnnnnnncacgcagtgctaaaactgaggatgatttccctaatgcttctgcttggccttatggaggagctgctccttccttacagccttggggatggacttgcccacacctccacctcccctgagccctgtgagaggcacgactgtctatgccaatgaggctcggtggggggctctcaagtgcctgatcctgccctgggctcagagccagcccagagggaagcaactgcacagccccacaggccctccntggcactgtccccccaaccccatctcagagctcagagggtacaagctccagaacag

SEQ ID NO: 294 - DNA, 508 bp, Homo sapiens
  misc_feature (33)..(199): Each "n" represents a nucleotide selected from a, t, g or c, or contains no nucleotide.
ccagatgcaatcaatgccccagtcacctgctgntataacttcaccaataggaagatctcagtgcagaggctcgcgagctatagaagaatcaccagcagcaagtgtcccaaagaagctgtgatcttcaagaccattgtggccaaggagatctgtgctgaccccaagcagaagtgggttcaggattccatnggaccacctnggacaagcaaacccaaactccgaagacttgaacactcactccacaacccaagaatctgcagctaacttattttcccctagctttccccagacaccctgttttattttattataatgaattttgtttgttgatgtgaaacattatgccttaagtaatgttaattcttatttaagttattgatgttttaagtttatctttcatggtactagtgttttttagatacagagacttggggaaattgcttttcctcttgaaccacagttctacccctgggatgttttgagggtctttgcaagaatcattaataca

SEQ ID NO: 295 - DNA, 503 bp, Homo sapiens
gtggtctatttcccagttcgaggccgctgcgcggccctgcgcatgctgctggcagatcagggccagagctggaaggaggaggtggtgaccgtggagacgtggcaggagggctcactcaaagcctcctgcctatacgggcagctccccaagttccaggacggagacctcaccctgtaccagtccaataccatcctgcgtcacctgggccgcacccttgggctctatgggaaggaccagcaggaggcagccctggtggacatggtgaatgacggcgtggaggacctccgctgcaaatacgtctccctcatctacaccaactatgaggtgggcaaggatgactatgtgaaggcactgcccgggcaactgaagccttttgagaccctgctgtcccagaaccagggaggcaagaccttcattgtgggagaccagatctccttcgctgactacaacctgctggacttgctgctgatccatgaggtcctagcccctggctgcctggatgc

SEQ ID NO: 296 - DNA, 553 bp, Homo sapiens
caaaccatgtcagctcgaactccaccggaagcagctagtttcggctctggcctccaagtccacagtggaaccagcccagacccttctccttagaagtggaagtagtggagcccctgctctggtggggctgccaggggagaccccgggagccggaaggaggccgtccatcccgtcgacgtagaacctcgaggtttctcaaagaaatttccactcaggtctgttttccgaggcggccccgggcgggtggattggatttgtctttggtgaacattgcaatagaaatccaattggatacgacaacttgcacgtattttaatagcgtcataactagaactgaattttgtctttatgatttttaaagaaaagttttgtaaatttctctactgtctcagtttacattttcggtatatttgtatttaaatgaagtgagactttgagggtgtatattttctgtgcagccactgttaagccatgtgttccaaggcattttagcggggagggggttatcaaaaaaaaaaaaaatgtgactcaagacttccagagcctcaaatga

SEQ ID NO: 297 - DNA, 397 bp, Homo sapiens
  misc_feature (155)..(306): Each "n" represents a nucleotide selected from a, t, g or c, or contains no nucleotide.
cgagccctgtgctcgggaagtcccgcagaacgccggcagctgctgcctcgcgcccgggagcaggaggagctgctggcgcccgcagatggcaccgtggagctggtccgggcgctgccgctggcgctggtgctgcacgagctcggggccgggcgcanccgcgctgggganccgctccgcctgggggtgggcgcanagctgctggtcgacgtgggtcagaggctgcgccgtgggaccccctggctccgcgtgcaccgggacggccccgcgctcagcggcccgcagagccgcgccctgcaggaggcgctngtactctccgaccgcgcgccattcgccgccccctcgcccttcgcagagctcgttctgccgccgcagcaataaagctcctttgccgcgaaaa

SEQ ID NO: 298 - DNA, 579 bp, Homo sapiens
tcctgaagccatcaactttggctccttcaccatcaagtcagacgtctggtcctttggtatcctgctgatggagatcgtcacctacggccggatcccttacccagggatgtcaaaccctgaagtgatccgagctctggagcgtggataccggatgcctcgcccagagaactgcccagaggagctctacaacatcatgatgcgctgctggaaaaaccgtccggaggagcggccgaccttcgaatacatccagagtgtgctggatgacttctacacggccacagagagccagtaccaacagcagccatgatagggaggaccagggcagggcagggggtgcccaggtggtggctgcaaggtggctccagcaccatccgccagggcccacacccccttccttcacccagacacccaccctcgcttcaggccacagtttcctcatctgtccagtgggtaggttggactggaaaatctctttttgactcttgcaatggacaatctgacattctcaggaagcccccaagttgatatttctatttcctggaatggttggattttagttacagctgtgatttggaaggg

SEQ ID NO: 299 - DNA, 421 bp, Homo sapiens
  misc_feature (120)..(375): Each "n" represents a nucleotide selected from a, t, g or c, or contains no nucleotide.
actctgagcaagtcccagatatactacaactcaatgcaatctttaacatgttgaataccaagaactgcccaagtttgaaggacaaaccgaaggtgatcatcatccaggcctgccgtggtnncagccctggtgtggtgtggtttaaagattcagtaggagtttctggaaacctatctttaccaactacagaagagtttgaggatgatgctattaagaaagcccacatagagaaggattttatcgctttctgctcttccacaccanntaatgtttcttggagacatcccacaatgggctctgtttttattggaagactcattgaacatatgcaagaatatgcctgttcctgtgatgtggaggaaattttccgcaannttcgattttcatttgagcagccagatggtagagcgcagatgcccac

SEQ ID NO: 300 - DNA, 285 bp, Homo sapiens
  misc_feature (37)..(46): Each "n" represents a nucleotide selected from a, t, g or c, or contains no nucleotide.
gaccttcagttggagctgaactcggaatccgaagttnggaaccccngggggccgagggctgccggtccgggctccgctcagcaccctcaacggcgagatcagcgccctgacggccgaggcggcatgcgttcctgcggacgatcgcatcttgtgtcgctgaagcgcctcccccagggaccggcggaccccagccatccagggggcaagaggaattacgtgctctgtgggtctcccccaacgcgcctcgccggatctgagggagaacaagaccgatcggcggccact

SEQ ID NO: 301 - DNA, 328 bp, Homo sapiens
ctctcagaacatactgattgggaggtgcgtgttcagcagaacctgcacacaggacagcgggaaaaatcgatgagcgccacctctttaaaaactcacttacgtttgtcctttttcactttgaaaagttggaaggatctgctgaggcccagtgcatatgcaatgtatagtgtctattatcacattaatctcaaagagattcgaatgacggtaagtgttctcatgaagcaggaggcccttgtcgtgggatggcatttggtctcaggcagcaccacactgggtgcgtctccagtcatctgtaagagcttgctccagattctgatgcatacgg

SEQ ID NO: 302 - DNA, 267 bp, Homo sapiens
tacaaggagacatctgtggtttccccaaccgttccaaaaggctatttcaaaggaaccagcccacgtatgagaaatgaatgtaacactgtggacattgacttcccgcataaggcagggtgaccccctgaactccagatgtttgcacagtatcttatgtgttgttttccgttgtgacgaatgtgattggaacatttggggagcacccagagggatttttcagtgggaagcattacactttgctaaatcatgtatttattcctgattaaa

SEQ ID NO: 303 - DNA, 421 bp, Homo sapiens
  misc_feature (66)..(148): Each "n" represents a nucleotide selected from a, t, g or c, or contains no nucleotide.
gtgaagatcctcaaagacttccctgaggaggacgaccccaccaactggctgcgttgctactactangaanacaccntcancaccntnangganntcgcggtggaggaagatctcagcagcactcccctattnnnnnnnnnnnnnnnnntcacaaggcgggagttccagagagaggacatagctctgaattaccgggacgctgagggggatctggttcggctgctgtcggatgaggacgtagcgctcatggtgcggcaggctcgtggcctcccctcccagaagcgcctcttcccctggaagctgcacatcacgcagaaggacaactacagggtctacaacacgatgccatgagctgacggtgtccctggagcagtgaggggacaccagcaaaaaccttcagctctcagaggagattgggacc

SEQ ID NO: 304 - DNA, 561 bp, Homo sapiens
  misc_feature (90)..(535): Each "n" represents a nucleotide selected from a, t, g or c, or contains no nucleotide.
acctggacgccctcaagtgggaagagcgctgttcaaggaccacctgagcgtgacctctgtggctgctacagcgtgtccagtgtcctgccnggctgtgccnagccatggaaccatgggnagaccttcacntgcactgctgccnaccccgagtnnaagaccccnctaaccgccancntcncaaaatccggaaacacattccggcccgaggtccacctgctgccgccgccgtcggaggagctggccctgaacgagctggtgacgctgacgtgcctggcacgnggcttcagcccnnnnnnnnnnnnnnnncgctggctgcaggggtcacaggagctgccccgcgagaagtacctgacttgggcatcccggcaggagcccagccagggcaccaccacctncgctgtnnnnnnnnnnnnnnnnnnnncagcngaggactggaagaaggggganaccttctcctgcatggtgggccacgaggccctgccgctggccttcacacagaagaccatcgaccgcttggcgggtaaacccacccanntcaatgtgtctgttgtcatggcggag

SEQ ID NO: 305 - DNA, 176 bp, Homo sapiens
ttgaagaccccactaaccgccaacatcacaaaatccggaaacacattccggcccgaggtccacctgctgccgccgccgtcggaggagctggccctgaacgagctggtgacgctgacgtgcctggcacgtggcttcagccccaaggatgtgctggttcgctggctgcaggggtcaca

SEQ ID NO: 306 - DNA, 52 bp, Homo sapiens
cgtgatcacacttaccgagcttactttgatctgtttgtcaatagcatgcaaa

SEQ ID NO: 307 - DNA, 243 bp, Homo sapiens
attagatagtgcatcttctgaggtcaattaaaaggagaaaaaatacaatttctcactttgcatttagtcaaaagaaaaaatgctttatagcaaaatgaaagagaacatgaaatgcttctttctcagtttattggttgaatgtgtatctatttgagtctggaaataactaatgtgtttgataattagtttagtttgtggcttcatggaaactccctgtaaactaaaagcttcagggttatgtct

SEQ ID NO: 308 - DNA, 453 bp, Homo sapiens
tttgtatgtcaaagctttgactctataagcaaattgcttttttccaaaacaaaaagatgtctcaggtttgttttgtgaattttctaaaagctttcatgtcccagaacttagcctttacctgtgaagtgttactacagccttaatattttcctagtagatctatattagatcaaatagttgcatagcagtatatgttaatttgtgtgtttttagctgtgacacaactgtgtgattaaaaggtatactttagtagacatttataactcaaggataccttcttatttaatcttttcttatttttgtactttatcatgaatgcttttagtgtgtgcataatagctacagtgcatagttgtagacaaagtacattctggggaaacaacatttatatgtagcctttactgtttgatataccaaattaaaaaaaaattgtatctcattacttatactggg

SEQ ID NO: 309 - DNA, 397 bp, Homo sapiens
  misc_feature (86)..(335): Each "n" represents a nucleotide selected from a, t, g or c, or contains no nucleotide.
cctgctcttgtttatactgctggtttacactgtttctccaagccatcacagatatctcctgctgctatccccaaactgccactctnaactcttgaagtnnnnnnnnnnnnnnnnnnnnnnnnnnnnnnnnnnnnnnnnnnnnnnnnnnctctaatnagatgtcctaggtcctcccaattcttagnccttttatanctgtttttctccttctcttattccatttagtttttcaattcatacaaaaccgtatccaggccatcaccaatcattctntacnacaaatgtttcttctaacnnncccannnnnnnnnnnnnnnnnnnnnnnnnnnnnnnnntctaggttcccacgccgcccctaatcccgcttgaagcagccctgagaaacatcgcccattct

SEQ ID NO: 310 - DNA, 3016 bp, Homo sapiens
cccgggtccgggcggggaagagccgcctcaacggcagggcccatccgcgagaggccagcgcccccggccggtccagcccaggcccgccgcctccgccctgggctgctccctccgggccctgcaccgccctcctgctacttggaccgcttcctcacgccctcctccaccccgcgcgccagcctcccgcgcgcagcgtggggatctcggccaataaaggagaaagggcgcggcccgtacgcgcgccaggtgcgtgggcgagaccagctcacgcccctcctccagccgccaaggccccggcccacagctgcctggctgcagtcagaagcgtagcccgagacaaggaagggcgccttgactcgcacttttgtccggttcgaacgttctgctcagtggtgcgtggaatgcgagcgcgtcttaaaatcgatggcgcctaggagtccatgaaatacggtacaggcttccggcgacggatgccccgcccctcacccacgctccgccctccggggatgccccacccctcgtggcggtcccgcccgtccccgcgcaggcgcgctcgggctgccgctggctcttcgcacgcggccatggccgactccgagctgcagctggttgagcagcggatccgcagcttccccgacttccccaccccaggcgtggtattcaggtgcacgcacaggccgccctcgtggcgccccgacctgcgggcctaccggaattgggagcgcgtggcccgcgacctccgggcgggcggggcgggaaccctcgtctttcgcccccggggccctgccctccttcggccccggcgtcaccaggcctgtccttgggtccagggacatctcgcccgtcctgaaggaccccgcctccttccgcgccgccatcggcctcctggcgcgacacctgaaggcgacccacgggggccgcatcgactacatcgcaggcgagtgcccagtggccgcatctagggcgcttccgcctctgcgcgcgccgagggcagcacgtgggctctgcgcgtctgcttgggggagggcctttggggtgcttcagggggcgccgggacgggcgccgtgcttgggtcgcccgggaagggttgtgagattgagcccccgaggccgccgcgctgtgcaggcgtccttcccgcaggttccgggtccccagcccaggacaggcgtgaccgagttgccgggtcagttggtctccctggagtgcccaagctgaatccacagggcccagctgccttgcttcttgttccttctgcgagctggtattgagcgcctgccacgagccaggccttccctggtgaagatcacggaatgcccacccagggaagggaggcctggaggcctccgggagagcccaagaggtggcccagggagaacagagtgttcctggccgtcttgcctctcctagggtgtgacagcccactccctggacactgccctgaggaaagcgccagctcttgctggagccacaacactgccagagctcccttctcacctcctgcaggaagccctccctgacctcctgccaggccggggcagggtttccctgagcgtcccccaaccatcacagctcaggccacctcgagagactccctttttagacagaagccctggtgcagagctgcctttgagagtaagctgaggcctgtcaggtttctaccagcccagttacagatgggctgctcagctcagagagaggggtggtgactcccctaggaacacacagctaagaagtggtcccttaaaagacagacccaggtctgcactctgacctggaagcagctccgggtaggtgatgggtaacattccttaaatggtgcatgtcactggcctttcagctgggagccaaccaggtaccccttgccaccggccaaccctggcccctggggattcccatgctgccgagtcactcctgtcacttaccctgacaggcctagactcccgaggcttcctctttggcccctccctggcccaggagcttggactgggctgcgtgctcatccgaaagcgggggaagctgccaggccccactctgtgggcctcctattccctggagtacgggaaggtaagagggctggggtggccagaggaagggcagggccaggccaccgtggccactctcccccagttctaaaaggccttcccaggcgtgtcaagtggagctgctgtggttacagtggccttgggagctcagagaggttgagacataggctgggctcacacagccaggtaacagcagggtggggttggagtcagggtctagggtggcagctgccaagctgtgcaacaaagctgttttctgcgggaggctgaggaccacacaccacttcccactccaggctgagctggagattcagaaagacgccctggagccaggacagagggtggtcgtcgtggatgatctgctggccactggtggtaagggtctccccgcagccaactgctgtggctccaagggcctggtgggagtgggacaggacctcgctgtgtgacatgggatgcagcttactgttgtccagagggtgcctggtggccaggccgacaccttcctctccccatgccttcccctccccaacccaggggctggcctggagcacctgctctctgcagcccaggccaactggggacctcaccctcccatccccaggaaccatgaacgctgcctgtgagctgctgggccgcctgcaggctgaggtcctggagtgcgtgagcctggtggagctgacctcgcttaagggcagggagaagctggcacctgtacccttcttctctctcctgcagtatgagtgaccacagggcctcccagcccaacatctccagctggatcccagggaaatatcagccttgggcaactgcagtgaccaggggcaccggctgcccacagggaacacattcctttgctggggttcagcgcctctcctggggctggaagtgccaaagcctggggcaaagctgtgtttcagccacactgaacccaattacacacagcgggagaacgcagtaaacagctttcccac

SEQ ID NO: 311 - DNA, 6165 bp, Homo sapiens
  misc_feature (2435)..(5358): Each "n" represents a nucleotide selected from a, t, g or c, or contains no nucleotide.
tctagaagattgactcatgcaaaatgcacatcaagttattgtgaggtcctgaaatgatatctggggcttgggcagaggatcgttatagagtttgccctaccactcaaatgctttgggaggtatgcttcctttacacctctcaaatgtgcttctggtcttctggcttaggaagtcaaaatttaaacctagtcctctatggaaaaatgggctcctgtaacatcctgcagaattattaaaataaaacaaggacctagatggataactttcatttgcactcactcagctccaaatcagcatgatccccaaagtctcttgcagctcagaaattccatgaagctagcttacttttcctaacaagaaaatccccttctagaaatgcccatccgctatttgtaaactttcttagtaaactgataaatagatcatttgcccttaaaacaaacttttaatttcaactctgaaagacatgcatatatgtccttcagaatcttaccttttaaaatggaaactgcttggaagtggcttttacctggggaatatgacatgcatgtgtctgttatactgccttcctgccaaaataagtgtgtctttaggcacgctctttgcatattctattgctaactacattttgccagacactgcttgtgaatgcagtatgtgtgagaccactgcccagcttcctgtagtgctagtcctacatttccacacagaactcctcacctagccaaattcttgagcgctttgcagtcagcagcactacctgaggctctgcctgagtgtcactttagttgtcttgcagaaagcttcagatgtccttggttctatttaggttgtgcaaatagacatatgaggtttggttctggttagtggttgctagtaccagatcaccttgcttactggtgagttcattcaaacccaaaaagtcacacctgtgtcctgtgcgcgggtgctgcaggcttaggtggagaaaagcagggctagaattggaacccaaagcccagaatggcaggagaggatgtgggggctccacccgatcacctctgggttcaccaagagggtatctaccgcgacgaataccagcgcacgtgggtggccgtcgtggaagaggtaactgtttacattttgcttatttctttgattttgctttcaagtaacttggtttctattccagtctcaatattctgaagtctttggttttatttttgatcattcctttccattaggagacgagtttcctaagggcacgagtccagcaaattcaggttcccttaggtgacgcagctaggccaagtcaccttcttacctcccagctacctctcatgtggcaactctacccggaggagcgctacatggataacaactctcgcttgtggcagatacagcatcatttaatggtacacatgttgcttaattattttccattgtactgggactctcgtaacagagtactccataaacttttctttttctgacaggtcaggggagtacaggagctgttgcttaagcttttgcctgatgactaacctggtatgtatttctatttctcctctgtcctccccctctttgttttggctctattcagttgtggtgattttaatgatttttttttccaggtgctgggattctacgaagatatgctcctttgttctgttcagtatttggcaatcacttcatccactactgcagtgcacccacccttgggcctggggggagggagtgggttgaaaaactgctcaagaaacagaagtttagcaagggtcatgaagaatactgcaagtgaaactgcagagagaggttacgtaggcagaaagcaagtcaacaaaagcacttagtcaggatccgtaacttgaaattgactcctttggaaattgccatagaacccttaatggacatcatcggctggacctgggatctgatgaatcccacaaaagtcagcaccttctacagaacagatgccctgatcaccaaggacttggtactgatttagagagaagagagcagctcctagcagcatcaacatctatttgtcgcttatttgccctgcagcaattcacctgcctttccttctcccatcctgtaaatatcctaggttttgctccagtgtttcccatcccagtactgacctaatttggatctgctgagtatttagagggctctgaaaagagatatgcattgatgaaattagctacaaaggcttgtgggcctttttttctatctgaaatcgtgtcttcaaattactggaagttgctgatcaaaattgtgggctcttgaattcaatcaactcttttgaatactgtaaaccaacgttaggctagaggagccgacgggcagtggctctatcattcgcagaagaaacccttgataaatgattaaactccttgagctttttttattacgcatatataaatgggaatcatacctacctcaaagcattnnnnnnnnnnaaaaccttacttttaatgtatataaactgttataactactttaactcaggaaattctttacaagatgtaaatgttttcctaggaatcagcaatatttggtgttattacttcctgagaaaggtgccagttaagcagctaaaatggtttttcttgaagttctatagaaaccacgttatttaaaatatctgtaatcagagaatgaattcaaggttttttttccatgtaaagctatttatatcttccaagcctaatgaaatggatattataaaaatacagttgattcatcctatgtttgggaagagtatttttagtgtaattattttccagcaattgtaagggcatatagtgcttgtctcagaagaaaattccacgtagaggggctttaaagtctttatggaaaaaagaaaaataaaaatcatttttcttgttttagttttctggatatgccgcagaaggatccgtgccagaagcaagcctgtgagatacagaaatgtttacaaggtagtatattgtaaaatgctttaaaaatatttttccactgtgaactaactataagagaccaattattcttttatctgtattaactcttttttaagaatgtaacgtatatgtaattatcctgaagattctcttcattgtatcaaagatgcagaaaataaaaagtaatgtgatcaaagctaaaaatttcactccaggtgattagcatcacctggagatctttaaacacttacctagaacaattcagacttcctagggctagggctagaaaaaaagggttttttgttgttgttgtttgtttttactaaaaggctagttttaaattggttatacttcactgcagctgacataacactttttaaaagcaatctggaagaggtgcggttgaaataacaattggaattnnnnnnnnnnnnnnnnnnnnnnnnnnnnnnnnnnnnnnnnnnnnnnnnnnnnnnnnnnnnnnnnnnnnnnnnnnnnnnnnnnnnnnnnnnnnnnnnnnnnnnnnnnnnnnnnnnnnnnnnnnnnnnnnnnnnnnnnnnnnnnnnnnnnnnnnnnnnnnnnnnnnnnnnnnnnnnnnnnnnnnnnnnnnnnnnnnnnnnnnnnnnnnnnnnnnnnnnnnnnnnnnnnnnnnnnnnnnnnnnnnnnnnnnnnnnnnnnnnnnnnnnnnnnnnnnnnnnnnnnnnnnnnnnnnnnnnnnnnnnnnnnnnnnnnnnnnnnnnnnnnnnnnnnnnnnnnnnnnnnnnnnnnnnnnnnnnnnnnnnnnnnnnnnnnnnnnnnnnnnnnnnnnnnnnnnnnnnnnnnnnnnnnnnnnnnnnnnnnnnnnnnnnnnnnnnnnnnnnnnnnnnnnnnnnnnnnnnnnnnnnnnnnnnnnnnnnnnnnnnnnnnnnnnnnnnnnnnnnnnnnnnnnnnnnnnnnnnnnnnnnnnnnnnnnnnnnnnnnnnnnnnnnnnnnnnnnnnnnnnnnnnnnnnnnnnnnnnnnnnnnnnnnnnnnnnnnnnnnnnnnnnnnnnnnnnnnnnnnnnnnnnnnnnnnnnnnnnnnnnnnnnnnnnnnnnnnnnnnnnnnnnnnnnnnnnnnnnnnnnnnnnnnnnnnnnnnnnnnnnnnnnnnnnnnnnnnnnnnnnnnnnnnnnnnnnnnnnnnnnnnnnnnnnnnnnnnnnnnnnnnnnnnnnnnnnnnnnnnnnnnnnnnnnnnnnnnnnnnnnnnnnnnnnnnnnnnnnnnnnnnnnnnnnnnnnnnnnnnnnnnnnnnnnnnnnnnnnnnnnnnnnnnnnnnnnnnnnnnnnnnnnnnnnnnnnnnnnnnnnnnnnnnnnnnnnnnnnnnnnnnnnnnnnnnnnnnnnnnnnnnnnnnnnnnnnnnnnnnnnnnnnnnnnnnnnnnnnnnnnnnnnnnnnnnnnnnnnnnnnnnnnnnnnnnnnnnnnnnnnnnnnnnnnnnnnnnnnnnnnnnnnnnnnnnnnnnnnnnnnnnnnnnnnnnnnnnnnnnnnnnnnnnnnnnnnnnnnnnnnnnnnnnnnnnnnnnnnnnnnnnnnnnnnnnnnnnnnnnnnnnnnnnnnnnnnnnnnnnnnnnnnnnnnnnnnnnnnnnnnnnnnnnnnnnnnnnnnnnnnnnnnnnnnnnnnnnnnnnnnnnnnnnnnnnnnnnnnnnnnnnnnnnnnnnnnnnnnnnnnnnnnnnnnnnnnnnnnnnnnnnnnnnnnnnnnnnnnnnnnnnnnnnnnnnnnnnnnnnnnnnnnnnnnnnnnnnnnnnnnnnnnnnnnnnnnnnnnnnnnnnnnnnnnnnnnnnnnnnnnnnnnnnnnnnnnnnnnnnnnnnnnnnnnnnnnnnnnnnnnnnnnnnnnnnnnnnnnnnnnnnnnnnnnnnnnnnnnnnnnnnnnnnnnnnnnnnnnnnnnnnnnnnnnnnnnnnnnnnnnnnnnnnnnnnnnnnnnnnnnnnnnnnnnnnnnnnnnnnnnnnnnnnnnnnnnnnnnnnnnnnnnnnnnnnnnnnnnnnnnnnnnnnnnnnnnnnnnnnnnnnnnnnnnnnnnnnnnnnnnnnnnnnnnnnnnnnnnnnnnnnnnnnnnnnnnnnnnnnnnnnnnnnnnnnnnnnnnnnnnnnnnnnnnnnnnnnnnnnnnnnnnnnnnnnnnnnnnnnnnnnnnnnnnnnnnnnnnnnnnnnnnnnnnnnnnnnnnnnnnnnnnnnnnnnnnnnnnnnnnnnnnnnnnnnnnnnnnnnnnnnnnnnnnnnnnnnnnnnnnnnnnnnnnnnnnnnnnnnnnnnnnnnnnnnnnnnnnnnnnnnnnnnnnnnnnnnnnnnnnnnnnnnnnnnnnnnnnnnnnnnnnnnnnnnnnnnnnnnnnnnnnnnnnnnnnnnnnnnnnnnnnnnnnnnnnnnnnnnnnnnnnnnnnnnnnnnnnnnnnnnnnnnnnnnnnnnnnnnnnnnnnnnnnnnnnaaaattatatattaaaatagctttcttccactttgcaaatcatactttcccctaacgaacctgtcgacaggtctctaaattagaaagaattcagtggactttggtatatcttctttcttccagttccataggtactgaaagtgaaaaggggtgggaagcactgatctaaacctccctgtaccttagtcctatgagatcatgactagagtctgcctgtatgtttttcagccaacagctacatggaatcaaagtgtcaggctgtcatccaagaactgcgtaagtgttgtgctcagtatcccaagggaagatctgtcgtctgttcaggatttgaaaaagaagaggaagaaaacctaacacggaagtctgcatcaaagtaaagttcttctgaagtgctgctccatgtttccaccaaatgaattttttttatcctcctgactcttcaggccaggtagcagcaaatagcaaatgaaaaagtcagctacaaaagttaatgaatatgccatctatgcagaacaggcagaaatataaacacattaaaagacaaatatgtagaatgtaatatactgagctgctaaaataaacctgtttaagagaaaaatttgggttttgtactaaatgtattttaagactattagatatagggtattaatgaattctcttgaagttcaagccactagtgccattcatcaaatttaagtcatatgaggtatgttaggtgaaaggactcacttccagcatcacaattttgacgcctttttttttttttttttttttttttgagatggagtctcactctgtcatccaggc

SEQ ID NO: 312 - DNA, 949 bp, Homo sapiens
  misc_feature (434)..(944): Each "n" represents a nucleotide selected from a, t, g or c, or contains no nucleotide.
tccccgcccttctcttttctacagtatctgttacctcagtcagattgaggatgcacatatactgggaaaataatcgacttccagcgtccctcatgtagtctctacctgattcaggaatctctaacccagtatcggaacgttaagcggcttctccgctttcctgccgtgagaaactcgaggtgacaacctccgtttccggttggctccggttgcagagttgagtgtcctgagaggtcagattgctgtcagacatggcccatgaacatggacatgagcatggacatcataaaatggaacttccagattatagacaatggaagatagaagggacaccattagaaactatccagaagaagctggctgcaaaagggctaagggatccatggggccgcaatgaagcttggagatacatgggtggctttgcaaagagtgtntccttntctgatgtattctttagaggattcaaatggggatttgctgcatttgtggtagctgtaggagctgaatattacatggagttcatgaataaaggttagaagcctctcctgangattattccctggaaccatcatagttggtttcgtaactcttcgaaattaggattcgtctctggaggccacattgccgtggttaacctntccagatatttggaagatttatccattaaatatatntgtgtatggcaanaaagaaaagaaaaaagctcttaatacggccgacgctatcccttgngagggtaattacttgcatccggcgtttacgcggcatgaactatggtccactacccttgagaatccttcgctggtaaaagcgcccgtcctcttcaattcgcgaagaggcctctctcggggnttgggtgaatacacggctgttttctngtgctgcaaggtgtggtttcccacaagctgtcaaacttgcgtactcacaataggtgaacaaacctncctgg

SEQ ID NO: 313 - DNA, 1511 bp, Homo sapiens
gaattccgggcacccctcgagcgagcgagctagccagcaggcatcgagggggcgcggctgccgtccggacgagacaggcgaacccgacgcagaagagtccaccaccggacagtcaggtagccgccgcgtccctcgcacacgcagagtcgggcggcgcggggtctcccttgcgcccggcctccgccctctcctcctctcctttccccttcttctcgctgtcctctcctctctcgctgcccgcgtttgcgcagccccgggccatgtccgacgcgtccctccgcagcacatccacgatggagcgtcttgtcgcccgtgggaccttcccagtactagtgcgcaccagcgcctgccgcagcctcttcgggccggtggaccacgaggagctgagccgcgagctgcaggcccgcctggccgagctgaacgccgaggaccagaaccgctgggattacgacttccagcaggacatgccgctgcggggccctggacgcctgcagtggaccgaagtggacagcgactcggtgcccgcgttctaccgcgagacggtgcaggtggggcgctgccgcctgctgctggcgccgcggcccgtcgcggtcgcggtggctgtcagcccgcccctcgagccggccgctgagtccctcgacggcctcgaggaggcgccggagcagctgcctagtgtcccggtcccggccccggcgtccaccccgcccccagtcccggtcctggctccagccccggccccggctccggctccggtcgcggctccggtcgcggctccggtcgcggtcgcggtcctggccccggccccggccccggccccggctccggctccggccccggctccagtcgcggccccggccccagccccggccccggccccggccccggcccccgccccggccccggccccggacgcggcgcctcaagagagcgccgagcagggcgcgaaccaggggcagcgcggccaggagcctctcgctgaccagctgcactcggggatttcgggacgtcccgcggccggcaccgcggccgccagcgccaacggcgcggcgatcaagaagctgtccgggcctctgatctccgatttcttcgccaagcgcaagagatcagcgcctgagaagtcgtcgggcgatgtccccgcgccgtgtccctctccaagcgccgcccctggcgtgggctcggtggagcagaccccgcgcaagaggctgcggtgagccaatttagagcccaaagagccccgagggaacctgccggggcagcggacgttggaagggcgctgggcctcggctgggaccgttcatgtagcagcaaccggcggcggctgccgcagagcagcgttcggttttgtttttaaattttgaaaactgtgcaatgtattaataacgtctttttatatctaaatgtattctgcacgagaaggtacactggtcccaaagtgtaaagctttaagagtcatttatataaaatgtttaatctctgctgaaactcagtacaaaaaaaccgggattccggcc

SEQ ID NO: 314 - DNA, 13863 bp, Homo sapiens
  misc_feature (13216)..(13249): Each "n" represents a nucleotide selected from a, t, g or c, or contains no nucleotide.
aagcttaggaagcacaagaggctgagcctttcaggtcagcaaagacttcccagaggaggcagtgcctacactgaggtcagagtgacaagaagagtaatggaccactgtaaagacttgggttcggccgggcgcggtggctcacgcctgtaatcccagcactttgggaggccgaggcgggtggatcatgaggtcaggagatcgagaccatcctggctaacaaggtgaaaccccgtctctactaaaaatacagaaaattagccgggcgcggtggcgggcgcctgtggtcccagctactcgggaggctgaggcaggagaatggcgtgaacccgggaagcggagcttgcagtgagccgagattgcgccactgcagtccgcagtccggcctgggcgacagagcgagactccgtctcaaaaaaaaaaaaagacttgggtttgacttgattgagcccaggagttcgagacaagcctgggcaatatagtgagacctcatctctacaaaaattttaaaaattagcctggtgcggtggctcatgcctgtaatcccagcactctgggaggccgaggtgggcggatcacttgaggtcagaagtttgagaccaccctgaccaacatggagaaaccccgtctctactaaaaatacaaaattagccgggcatggtggcgcatgcctgtaatcccagctactcgggaggctgaggcaggagaattgtttgaacctgggaggtggacgttgcggtgagccaagatcacactattgcactccagcctgggcaacaagagcaaaactccgtctcaaaaaaaaaaatttatttttaaattagccaggtgtagccacagctgtagtcaaatctactaggcaggctgaggtgggaggattgcttgaacctgggaggcagaggttgcagtgagccaagatggtgccacggcattccagcctgagcaacagcaagaccctgtgtccaaaaaaaaaaaaaaaaaaaaccgtaaaataggccaggcacagtggttcatggttataagcctagcactttggaaggctgaggagggtggatcgcctgagctcaggagttcaagaccagcctgggcaacacggtgaaaccccatctctaccaaaaaaaaaaaaaaaaaaaattagccaggcatggtggtgtgtgcctgtggtcccagctactcaggaggctgaggtggaagagtgcttgtgcctgggaggcagaggttccagtgaaccgagatcacaccattgtactccagcctgggcaacagagtaagaccccatctcaaaaaaaaaaaaaaaaattaagataaaccctttggcagctgcgtgctgctcttagcctcaaacccaagtcttttttttccccctttgagacggggtctattgcccaggctggagtgcaatggtatgatccatactcactgcagccccgaactcctgggcttccaaagtgctgggattacaggtgtgagccaccaggcccagactgctgaagggtttaaaccagagaaagaatgtgaccagatttccaatttagaaagacccgctctctgcagggtaaggagagcctgggggtccgggggcggggggcaagaattgcaaggtaaccagggaggccagtgcaatgtccaggtgggagaggatgctagctgagactagaagtgctaggaaaaggatgtgtgcagacaagaggtcactggggaggtgaaataacaaggcttggccatgagtggaacccaacacccatggtgccctcttgagagagggaagatggcacctgagatggaagatggaaagaccagggtccctgtgactgaggactgagcctctgtttgaggtttttgcagaggagtaaaggcaacaaaagaggcaagagttggaagaaaggtgacaaggaacaaaagtcagctatgcctgatgctactgggtggccagcaacaatgctgacttggccaaggctctgagagctttactatgctgggactggaggtcagagttgaggctagggtaagagcaaggggctcagagatggagggggaggaggacctgaacaagtccagaagggaagagatttgtccctctatccaacagagtacccagtgagcagcacagagggcacagcaagggacatcacccggttccccaaatgctcagagccacaagtgaagccaaaagtgaaagacaagatgcagaaaaccgccacgggcctttgaggaagggtaaaggcgaaagcgaaagcaggaagtacagacgtgaagcctagcagaggactttttagctgctcactggccccgcttgtctggccgactcatccgcccgcgacccctaatcccctctgcctgccccaagatgctgaagccagccctggagccccgagggggcttctccttcgagaactgccaaaggtgaagcgggggcgcggggggcggtcactcctgagccgcctctgcttgctcgtggccttttttcctggctgggggtgggggagggtgtgttggtcgacttgggttccaggcttaccccggaagatgagggagacggggaccaggttaggggaagcaacaggggtcttgaaagcagagccgaaacatgggcgccctcctccgtttccagaaatgcatcattggaacgcgtcctcccggggctcaaggtccctcacgcacgcaagaccgggaccaccatcgcgggcctggtgttccaagtgagcagcggggagggacggggagctggaggggagccgagagtatcgagcaggcactgaagctgcggtccctccctctcctcaggacggggtcattctgggcgccgatacgcgagccactaacgattcggtcgtggcggacaagagctgcgagaagatccacttcatcgcccccaaaatctagtgagactcccgagcccagttcccgtacgcaaaaaagaacggccccctcgttcccactccggtccccgcacgtcccagccctgcccacaccgatcctcccttttgcctcagctgctgtggggctggagtagccgcggacgccgagatgaccacacggatggtggcgtccaagatggagctacacgcgttatctacgggccgcgagccccgcgtggccacggtcactcgcatcctgcgccagacgctcttcaggtgcgggggcagggctaacaggaccccggcaggtagtttacggggttggggccattggaaggcgggacagaaagaagggcgggaccgcgacgggccaggtgaccggaagaggccggcccaagagaacctgggctacaggaaaaggcgatgtcagtcatcgggcgccagcccacaggaaggagcggggatagcacctaggagctgggcatagagaggtgggcctaggccccagcttgtggccgaccccgcccatcctcgagcaggtaccagggccacgtgggtgcatcgctgatcgtgggcggcgtagacctgactggaccgcagctctacggtgtgcatccccatggctcctacagccgtctgcccttcacagccctgggtgagcgcttctgtcccttctcctcgaactctgcccctggtgaccttggcctcactccaaacggcgtcgcagcggttgacttcagatgcttctcctgccttcaggctctggtcaggacgcggccctggcggtgctagaagaccggttccagccgaacatgacggtgagcggcctctgtccccgactttgtggtcgctggtgggatgtgcacccgggagctgggggagcacaggaccctggcccagtgcgggtggctaaggcttgtcggaggaggtgaccactgaagggtgagtggagtaagggcagagaagtgcggtcccgacataacaccgtccaataccaaagcctgcacggctgggagaagtcgaagctcacagaggatctttaggagccgagggcggagagaaggaccagtagggtcctacttatatcaacgtctggagcctagattttgtttggggtgggatggaagcaggtgatgttgcctcagaggtggctaaggctcagagggagaaacacagtgggggtttggagggcaagaccagattgggtaagtggacaggcaagtccccaggctgtagcctaagttaacagcagagagagcccgttaggtctcacacacccatcaccgcagctggaggctgctcaggggctgctggtggaagccgtcaccgccgggatcttgggtgacctgggctccgggggcaatgtggacgcatgtgtgatcacaaagactggcgccaagctgctgcggacactgagctcacccacagagcccgtgaagaggtgagagctggagatcggggaccacagggatgtgtggggctatagcaggggagatagggggctgcaaaaaggggatgggccacatgacaggcccatgttcagaggctgtccctcctccctcccaggtctggccgctaccactttgtgcctggaaccacagctgtcctgacccagacagtgaagccactaaccctggagctagtggaggaaactgtgcaggctatggaggtggagtaagctgaggcttagagcttggaacaagggggaataaacccagaaaatacagttaaacagatggctgtgtcattcttgagtggaatggggtgggcaggcagccagcagggctctgtagctaaggcgtccctgcaggggccattacctaccatagctctagtgtctggcctaagagatgcccttcacccataacctcaggcacctacaactccagaaccccagccctggccagcattgcaggcttggtctccacccaaaccttccttctgactccacacttgaaggctcccccaccactccactgtcttgctcttgccctctagtccactgggagacttgtaaattatgaaataccccatgtactaccccctcctagagactttccatggctcctcagtggcccaggacaagctcatacctttcaatcaggcccccacaggccccactgagggctaaagtgctgacaagaggagccgctccctgactccaaggcaagttctcaccaagcactcctcaacctcgcaacatctttacctgtgacaccccttagatgacgaggcatgcctgcactgctcacgtgaagctcgtcttctgtctgcacatgctgggcttgtgactccaagttttccaggctaataagggtcacaggactcacatggggagagatgacacgtttctccaacaaacctttgctgggcccctgctgagtctcaggcctggctgctgggtgccagcaagagcatcctgtcctcagcgagaacggctgaactccgctggagcttcagaaatgtcagggagagtctacccagggcccagggagggtctatgccgggctgcacatccccaggctgctgagtgtgctccctgcaccccaacattctattaatgaacatttgtaaatgtaacagaaaagtagaaagagttgtatattgaatacccttatactgtcaggtcaccacagacctgacagtattttgttatatttgttttatcatctattcatccctctatccattaattcatcgctccttttttttttttttttttttttttgagacggcgtctcgctctgtcacccaggctctggagtgcaaatattttgttatatttgttttatcatctattcatccctctatccattaattcatcgctcctttttttttttttttttttgagacggagtctcgctctgtcacccaggctctggagtgcagtggcgcaatctcagctcactggaagctccgcctcccaggttcacgccattctcctgcctcagcctcccgagtagctgggactacaggtgcccgccaccacgcgcggctaatttttttttttttttgtatttttagtagagacgaggttctactgaacctgttagccaggatggtctttgatctcctgacctcatgatccgcccgcgtcggcctcccaaagtgctgggattacaggcgtgagccaccgtgcccagccaattcatctcattttttggctgatgctgtttctttgagatggggtctagctccatcgcccaggccggaatgcagtggtgcactcatggctcactgcagccttgaacttaagggctcaagtgatccctcctgcctcagccttctgagttgctgggactacaggtgtgtaccatcatacccagcacatttcttaatttaaaaaaattttttttgtagagacagggtttcatgatgttgctcaggctggtctcgaactcctggaatcaagcctcctacgtctgcctcccaaagttttgggattacaggtgtgagccaccacacccagccctgatctgttcttgaatcagttaaagccctcacactcccagaaggccgccagccaatgcacctgttggaactttgcacacagggtgtcttctcccttcaagcttggtctgcagctcagtaacaaatgggctacagacaccaggggcttgcccatgggagccccaaggcctaaagagggtggcagagatttgatgtctgtcactctccacctgcagcctcagtccacggtcggccaggcaccaagagctcacactttgccctcctaaatgccaggcccttcataagtatcatctcattgttaagagcggaggcttcagcgccagacaaatgcgagtttgcgtacaactcaaccacgtgctggtgggagagtcaccatctctgagcagacctgtgactcctgttccaaatggacgaggaaccactgcgatgatgtgttaggactcccagcctgccagaacctcacagcccctggcccttcacagcaaagttgaccgcagtgagcattccatccaccagtcagaacaccctggacgctgagcggaccttctctgaaagcctggtgcctttgttagccctgggtgactcctgtgatcccagccaccaggttgtcactatagacctaatttaaccatctgtcctcagtaccgagggctcaacatttggaatgggaggtggttctgggagccaattagaggccaggctttgggaggtggcagaggtgagtctcacaccttgggctctgtctgataagtctaggtctcggtcaggggaccttggcctaaagggcctgtcttgcctggagcgtgggagggggctgagtctacacagctggcctggcctcaggcctggagctttagctcaaggacgagaagacccataaagccagacccagctcccaacctcacatctgccacgatgttgctgctcagcctgaccctaagcctggttctcctcggctcctcctggggtgagtgggccaggaccagccctgattcagccctgggagcaactcagctcccagcaacagcccagggaaggagctaggctggctggaagggacgaaggtggacagagtgggtaaaagaaacaggatatgccagggcagtggagcagggaacagtcctgcagggctgggagggggcaagaggtggggtggtctcacaaataggaccagagattgagccaggccctggagcccgggagggtttaggaagctgagacaggaagacctgtccatgtcttttagaaagaaccttctggctgcatgaagggtatgaactgttcaggtcgggagggggcagagagaccaggggtagagatggggaacagcggggactaggctggagacagatgtaggagaacagcagggctgggggactgggtggatagggataaccaagatagctgtggggcccgaaggtgcttgcatgtaccctgttggggaaggggtagtgctgtaccctctcgacagacctctctggggtgcacagcctggggcacccaaaaggaggtggggaaagatgggctgaggcatgggaagcaggtcctcattagcccaatggccaggctgcggcattcctgccatcaaaccggcactgagcttcagccagaggattgtcaacggggagaatgcagtgttgggctcctggccctggcaggtgtccctgcaggtacaccaccagaggggtgggcagggtcctgggtacgtcatgcctaggggcagcctcagcagcccatccccactctgacctctgagccctgaccacaggacagcagcggcttccacttctgcggtggttctctcatcagccagtcctgggtggtcactgctgcccactgcaatgtcaggtgagtgcctgcattccacctgccccgcccctcgcctcttcctgcctcctcccctggctgtccccctctcgcgctggcctccctgcagctgcctaatcccacccccttgcagccctggccgccattttgttgtcctgggcgagtatgaccgatcatcaaacgcagagcccttgcaggttctgtccgtctctcgggtgagtgcctgggctgcagacacggaggaaaagtgggcagtgcaggtgggtgggtgctgggaacgaggaattcaggacatgccctggcctaccctgctcagcacccatcagaacatggactgtttctgaccccacaggccattacacaccctagctggaactctaccaccatgaacaatgacgtgacgctgctgaagctcgcctcgccagcccagtacacaacacgcatctcgccagtttgcctggcatcctcaaacgaggctctgactgaaggcctcacgtgtgtcaccaccggctggggtcgcctcagtggcgtgggtagggactcaggccaaagctcagggtgggaggactggggtggggacagtgttctgggccccatgtgaccacccctcctggccacaggcaatgtgacaccagcacatctgcagcaggtggctttgcccctggtcactgtgaatcagtgccggcagtactggggctcaagtatcactgactccatgatctgtgcaggtggcgcaggtgcctcctcgtgccaggtaagccccagcacccgctcctctgcgctgtcctagtggtatacctccccaaccccccctactcaattctccctccctcttccctctcagggtgactccggaggccctcttgtctgccagaagggaaacacatgggtgcttattggtattgtctcctggggcaccaaaaactgcaatgtgcgcgcacctgctgtgtatactcgagttagcaagttcagcacctggatcaaccaggtcatagcctacaactgagctcaccacaggccctccccagctcaacccattaaagacccaggccctgtcccatcatgcattcatgtctgtcttcctggctcaggagaaagaagaggctgttgagggtccgactccctacttggacttctggcacagaaggggctgagtgactccttgagtagcagtggctcttcctagagtagccatgccgaggccggggcccccacccctcctccagggcaaccccttggtcctacagcaagaagccagaactgttggaatgaatggcagccctccctggagaggcagcctgtttactgaatacagaggatacgtttacaaactgaatacgcataataaataactgcacattctccatccacaggccatggcatgaaggcccaagtgggtctatcaaaggcccacatctccaaacccctgtcctgccctcaggaccaggcccaccctgggcaagagagaacgtaagccccagggcttcaggtccccagagacacttggggaactggggggaaattctgaggccatggggcttggttctccactgcctcctgcccagggggatttggggacggtaggaggatgtgtctaaggcatagtcgacttggcacagagtggtctctttagttttgtttcccactggaggtggcacatgcaggaaaagggcctggcccaggctgccgaccggcagaagctgagtgggaaccaaaccctcctgcaattggcagggccctgccgtcaagctaaggccaaagctgggccctgggcccattctacccactgaaggcagctgtggaggaaggggcttgggttccagcctggtttgtggtagggggagataccacaaaagaaatggggatggttctggctcaggcctctgggaaagcagccacccaaccccacccacctcccgcaggggctccttccagcttgaggctcagtgggacccagactggaaggttaatgctgtgaagggaagcagcacagggtggacggggcaaggccagctgtgagaaggcagtgcccctggcaccctggtttcagaggcaggtcacacagtatggctaagttccagggaggggtgcgcagaagctcagcagaaggggagaggtgagcagcccgggaccctcccccagggcggcaactcctaccttcccatgtcctcatggaggactacaggtgtgcaccatgggtgggtgtgcacgatgggcaggtgtgcacgatgggcgtgcagtgatcactcccaggctgccaacacccatgcagacaccagatggcgccttcgtgcagctgcagaggagggagcaacagagcctgaagggaaaaggcaatggggctgcaccaaaggatagaacccaggctgacactcgaccctaatcgggaggacccccttccctctgccttggcccccaggtgccccattccccaggtagcagcagtggggctccctttaaccacccccagttgggaaggaggcacctggggaatggaatggacatcaacggggagagggaggtagcggtgctctacaaagaaggcaccaagggcggtgggctgagacccctcagaatcttggagaggctggagcctgggcaagccgatgaccagcatggccacacagtccagaagggtgaaggtccacgccatggccctccaccagaggtcctgggaccaggaaggctccctggaggcaccatgaaggaagacagatcttggctgggaggtggagggctgtttcgacctagccaggggctacgggtccagtcaaggcacaagctttgtgcctaccagggtctcccactggagcataatcttaaggatcaggatgcatgggaatgtgtgaaaccagggagaagggctctgtggaggaaagggggtcccagaagtaactgtcccaaagggtcctgaggccacaggacactccacccagcactgcagttccctttgattggggaaaagtcaaagggcaagggagacagtgaaggccaggtcctatcccttcccaactccaccagagcagctgcccaccaagaggggtatcagtgccagccaggctcccagttcagggggagtcacagccccctgtgctacctctactctgtcacacctggcccaggccatggtgaggacaggggctgctgaaggcacagagaaagggctggagccagacattcttcacctactgtgggccacataggcctatctccagagagggcatcggacccagatggcaccacagtgtgtggccaggctgggtcgtgctgcatgtgtgcacagccaggcggctcagccattgtattgctgctggtagcgcaggttgagctcccgcagctcccgttcccgcacacggcgtgacttattggagcgtgtggagcggctggaacgcgtggactgggcagatttggtgctctggcagcgcgaggaggcacgtttaaggaggttctgggatatggagcggtgcaggttcttcatggatgaagaggcagccatgctcaccacccacgggtgcctcagggcctgcagtgcagtcatacgggctccagggtccactgtcagcaggcggtcaatgaagtccttggccaggttggacacactaggccagggctagagaccaaggacaagcattagagtgagagcatctgacactgcccaccccatctggatgaggccactactcagcaaccctcccctttccagagagaggtgctgcccctcctctcatgtagcacttggggcctccccgcccaacgctggctcaggctgaacaagggctgctctccaggtgatggagtctggcaaggaaggaaaggacctgtgcactctcccagggagcaaattctatggtgcactggacccgaagcctggctccagggagatggcctctgccaagaccccccggaacgtgtcccaggagtatcataactcaggggactgttagagaatgattcaaactttcccaccacatcctaagtcagattgaagctccaatctctggatgaccaggatcaggctacttaaaggggaacttcctagtccttacagagaagatccaacctctctccaactgccgaagcagtggcagaagaccactgctccctgcctctcctcccggcatggggaggaaaggaaacaattcaaggcaactagatttcccagtcggctgagggcaggcgatcccgggccaggaaggaaccaggacccttctcagtggcaccctctggcccgcattacttctctaagccacaaagggctcctggcagtgctgtgcgccagcctcattttagtacattctgtcccctgggaggaactccataaagcccactctgccacatgcaccccgggctgcctcatctcagccccgaacccagcagctgtctgtctcagggcctcaggttgtacggctgtcttcacctgactggatcctcaggttctcagggtaaaggacacttgctcagactccctcttagcccccagtgcttccagcaattattccagctgtaacgtgagactgcaatttcatgttcgtttagtattcccatgagatcatgctgagctggatgagcccggcctggtgctgcgcatacaggaagcactcagtaggcacaggctcagacagtaaacaacccacggtgctgccggatgggtgccctttcctggagctgcttccaggccttggggctcagccaggtgagtccttgcgtccctgcatctcctaggaacacttctggcacgggctctgaggctcccccaaggataggcagctaggacctttcctgagcctgctgcagatgactcaacagggatgctaacgatcccctcatcttccttcctgccaggtgaggtctgcctgttccacccatggtacccttcaccttgaggaacccctgaacatgccctccagggggttcaggaggatctgagagaccaccttcagggcaggtgcacagccatctagcagacacacacactcactgactactgctactcccagtctggctcgcctgacctccaactctttccctacccccttccccactgccacagagggatgaggcanngagaacacgcttccaccgtcctgaggaaggcntggggctacctgcagctgctgtcttcacccactctttggaaggttattccaagttttactgagctgaagtgggagcaacaggggaaccatattcccaaacacacctaacagggtcatcctcatcagtgggccagcagcacacagtgactcctggggagatgctggccccaggaggaggaagtcagggtccaggagcatgcagccaacgaaggcccatagatgccttactatccaagggctgtgggtgggcgcagagagcaacagccctccccgacaggcaggtaagtctcctgggggcttgtgtagttcaagattcatattgagggccaggcgtggtggctcatgcctgtaatcccagcactttggggaggctgaggcaggtggatcacaaggtcatgagatcaagaccatcctggccaacatggtgaaaccccgtctctactaaaaatacaaaaattagtcgggcgtggtggcgtgcctgtagtccagctactcaggaagctgaggcaggagaattgcttgaacctgagaggcggaggttgcagtgagccaagatcgcaccactgcactccaggctgggaaagaggggggttccgtttccaaaaaaaaaaaaa

SEQ ID NO: 315 - DNA, 4051 bp, Homo sapiens
ttacccttcctaaagtggaaggtgacctcaagggcccagaagctgacatcaagggcccaaaagtggacatcaacacccctgatgtggatgttcatggcccagactggcacctgaagatgcccaaggtgaaaatgcccaaattcagcatgcctggcttcaaaggagaaggtccagatgtggatgtgaacctgcccaaggctgacattgatgtctcaggacccaaagtggacgttgatgttcctgatgtgaatatcgaaggtccagatgcgaaactaaagggccccaagttcaagatgcctgagatgagcatcaaagcccccaagatctccatgcctgatattgacttaaacctgaaaggacccaaagtgaagggtgatgtggatgttacccttcctaaagtggaaggtgacctcaagggcccagaagctgacatcaagggcccaaaagtggacatcaacacccctgatgtggatgttcatggcccagactggcacctgaagatgcccaaggtgaaaatgcccaaattcagcatgcctggcttcaaaggagaaggtccagatgtggatgtgagcctgcccaaggccgacatcgatgtctcgggacccaaggtggacgttgatattccagatgtgaatatcgaaggtccagacccaaaactgaaggtccccaaggtcaagatgcctgaaataaatatcaaagctcccaagatctccatacctgatgttgacctggatttgaaaggacccaaagtaaaaggagattttgatgtgtctgtccctaaggttgaagggactttgaaaggcccagaagtagatcttaaaggtccacgtctggatttcgaaggccctgatgccaaactcagtggcccatctttgaagatgccatcgctggagatatctgctcctaaagtaactgctcctgatgttgatttgcatctcaaggcaccaaaaattggattttcaggtccgaagttagaaggtggtgaagtggacctcaagggacccaaagttgaagctccaagcttagatgtacacatggacagcccagatattaacatcgaagggccagatgttaaaatccccaaatttaagaaacccaagtttggatttgggccaaaaagccccaaagctgacatcaagtcaccttcactggatgtcactgttcctgaggcagagctgaaccttgagactcctgaaattagtgttggtggcaagggcaagaaaagtaagtttaaaatgcctaaaattcatatgagtggtcctaagattaaggccaaaaaacagggatttgacctgaatgttcctgggggtgaaattgatgccagcctcaaggctccggatgtagatgtcaacatcgcagggccggatgctgcactcaaagtcgacgtgaaatcgcccaaaaccaagaaaacgatgtttggaaaaatgtacttcccagatgtagagtttgacattaaatcacctaaatttaaagctgaggcccctctccctagccccaaactggagggtgaactccaggcacctgatctggaactttctttgccagcgattcacgtcgaaggtcttgacatcaaggcgaaggctcccaaggtcaagatgccagatgtggacatctcagtgccaaaaatagagggtgacctgaaaggccccaaagtgcaggcaaacttgggtgcacctgacatcaacatcgaaggcctagatgctaaagtcaaaacaccgtccttcggcatttctgcccctcaagtctccatccctgatgtgaatgtaaacttgaaaggaccaaagataaagggtgatgtccccagcgtgggactggaaggaccagatgtagatctgcaaggtccagaagcaaaaattaagttccccaagttttccatgcccaagatcggcatcccaggtgtgaaaatggagggtgggggagccgaggtccatgcccagctaccctctcttgaaggagacttgagaggaccagatgttaagctcgaagggcccgatgtttctctaaaggggccaggagtagacttaccttcagtgaacctctctatgccaaaagtctctgggcctgaccttgatctgaacttgaaaggaccaagtttgaagggagacctggatgcatctgttcccagcatgaaggtgcatgctccagggctcaacctcagtggtgtcggtggcaaaatgcaggtgggaggagacggtgtgaaagtgccagggatcgatgccacaacaaagcttaacgttggggcaccagatgtgacactgaggggaccaagcctgcagggagatctggctgtctctggtgacatcaaatgccctaaagtatccgtaggagctcctgatctaagcttggaggcatccgaaggcagcattaaacttcccaaaatgaagctgccccaatttggtatctctactccggggtccgacttgcacgtcaatgccaaggggccacaggtttctggcgaactgaaggggccaggtgtggatgtgaacctgaaagggtctcggatttcagcaccgaatgtggactttaacttggaaggaccaaaagtgaaagggagccttggggccactggtgagatcaaaggccccactgtcggaggaggtcttccaggcattggtgttcaaggcctagaaggaaacctccagatgcctggaattaagtcctctggatgtgatgtgaacctgccaggcgtgaatgtgaaactcccaactgggcagatttctgggcctgaaatcaaaggtggtctgaaaggttcagaagtaggtttccatggggctgctcctgatatcagtgtgaaggggcctgcctttaatatggcatctcctgagtcagattttggcatcaacttgaagggcccaaaaatcaaaggaggtgcggatgtttcagggggtgtcagtgccccagacatcagccttggtgaagggcatttgagtgttaaaggttccgggggtgagtggaagggaccccaagtctcctctgctctcaacttggacacatctaagtttgctgggggccttcatttctcaggaccaaaggtggaaggaggtgtgaaaggaggtcagattggactccaggctcctgggctgagtgtgtctgggcctcaaggtcacttggaaagtggatctggaaaagtaacattccctaaaatgaagatccccaaatttaccttctctggccgtgagctggttggcagagaaatgggggtggatgttcacttccctaaagcagaggccagcatccaagctggtgctggagacggcgagtgggaagagtctgaagtcaaactgaaaaagtccaagatcaaaatgcccaagtttaatttttccaaacctaaagggaaaggtggtgtcactggctcaccagaagcatcaatttctgggtccaaaggtgacctgaaaagttcaaaggccagcctgggctctctggaaggagaggcagaggccgaagcctcttcaccgaaaggcaaattctccttatttaaaagtaagaagccacggcaccgctcaaattcattcagtgatgaaagagagttctctggaccttccaccccgacggggacgctggagtttgaaggtggggaagtgtctctggaaggtgggaaagttaaagggaaacacgggaagctgaaattcggtacctttggtggattggggtcaaagagcaaaggtcattatgaggtgactgggagcgatgatgagacaggcaagttacaggggagtggggtgtccctggcctctaagaagtcccgactgtcctcctcttctagcaatgacagtgggaataaggttggcatccagcttcccgaggtggagctgtcagtttccacaaagaaagagtagcaggcctttgtatgtgtgtacatatatatatatataacaaaacatcagccttgggtggtgtgttcctatataaactccaaagggaaacacaccgactgcctcagcaatcatgcaaagaccttgcctggcccggtggcaagcgctgaaaaaccgaccgcctgtaggctcctggaactatacagataggtaaagagttccaagttcgtccggaattc

SEQ ID NO: 316 - DNA, 34875 bp, Homo sapiens
gatccgcctgcctcggcctcccaaagtgctgggattacaggcgtgagcgaccacacccagtcctctctctcatattctttaacacacaatgattaattactaaaatgaagactcttgttttctgaagggaaaaagaaatatttgacaaccagctccttgaagagcggaaccggcgccgtcggtgagggagcagccggctgtgctgtcagcggggcctggcggtggaagcgcctccagtgtgcatgagcgtgtctgaagatggggggctcagggggcacgtttgcgtttggacctgtctgtgcgttctcctgcgtggcagtcctgatttccatgcttctggagaatccatttcgttaacactgaaagccagttctcttttcctggcagtttttttcattttatttttggcattttttacaagataccgttcgggaaaggcttttgaaaggacggaagcgtattcactgtgcgccagtactcctggctgtgctgtggtttctcccgacgtgcacatcgatctcgtatgtgtggcatctgatattaaacgggaggttttaagaagcgtctgccgtgatcatggagcttcggaagcgggaatggttcttccgggtttgctgttttgtctgtttcccccttgtgtggtttccgcctgcgacagttccagaatttgctctcccactcagtgtgctctgcagctgtgaggaaacagccttcgttagaggcgggagcagagacgagccgctgctctgtgtcgtgtttgctgtggccgcagggagaggagcaggacacgcacctttccaggggcctctgtgtcccgcactgtgtgtgagtggaccgcagcgcgcagccacatgccctggctgccatgggccagaccgcctccacctcccccgcccgcctggcctgtcctgagtgcatttccctgcactgtgtcgtcactgcacagccagtcaccgcggtctcagtcatcggcgcggatggctatgctggggtcccagggtggccgcagcagtcagggtcactgtgggagccctggggtggagtgacaaaccgcattgtcctgtgcccgccatggcagaagcgcagcctttgtatggaggcccaaccgcgctcccgtctggagaagcggcttccggggtgtggctgccgggtcggctctggtccacagcacggtgccggggctgcaggttgttgagggctgtgactccgtggggctcagccaggctccagcagggtcagacgtgctgttaagagcaaagccacagacgatgacttgtccattctcagtggatgctccaggctgtgcctacacagcagtgctggtgacatgtccagggttccagggcccggtggcctgggagctgctttctccccactggctgggctgcatctggccctggctggaggccttgctttgaggggctgtgaccctcttcccccaggccctccccagccgacgacagccaccggagaggagatcggaacacgattgtctcagatgcagggcgctgtgcgggacgaagccgcaaggactctcgtatcgggcccttgggactcgggaggtgccagaggcggcggctgctctggacctcggtgttcactgacctttgtttcacttgcctctgctcgactccgagagcaggaaacccggccgtggcctggcagctccgcctcccatgcccgcacgctggggtctgtcttgtctggagcagtggggcacaccccggaggaggcgggggtcagggctgtcggccttggccccctgctggtcgctgtttcggggactcggggcggccagtaccaccgcctgaggcggggctcagcagcgttgcatgtacgggcctcgtactgcctcatggaaaatcctccggagccgccctccattgtgggttcctgagagtaggacacattgccatggttttgtgggaatcacgcgcccctgatggaacttttctgctgttgtgaagtacttttatccatttgcttctctgctgaccttgccaagttgttcgaggtggaattaaacacctcccagacctctggcttgtcttttctgaacccccaaacacatcccactgcatgggttgtccaagcttggaaatgggagagtgaccctgccatccccagggacatggcctggccttggggtggattcccacctcactggcgggcctagggtgctgtttaaacagcagccagaggctgggcgcggtggctcacgcctgcaatcccagcactttgggaggccaaggcaggtggataacctgaggttagaagttcgagaccagcctggccaacatggtaaaacctcatctctgctaaaaaaaattagcgagcatggtggtgggcgcctgtagtcctagcacctggggaggctgaggcaggagaattgcttgaacccgggaggcagaggttgcagtgagccgagatcacgccactgcactccagcctggccacacagtgagactccgtctcaaaaaaataaacagcagccaggggcctcactggggttcatgcctgtggccccagctactggggaggcttagatgggaggaacacttgtttggaggtcaaggctgcggctccagtgagccgagatcacgccactgcactccagccggaatgacgatgagcacctgtgttgcagcatagccctgcccagcaggtggaaccagaatgtgccagaggcccccttgtgcgtcccaccccgcctgcaccctctgcccttactgtcctgtgggctctgagggtgtcaaggccgctgggacaggccctgcctgggtgcttccctcagtaatggggggtcgtgggtgctctgggttgtcagccgggcagttgagtgggagtcaggggtgctgacctcacaggcacggccagtgaggagcattccggggccctgaggatgccagcatgggtggtcctgggctcgccctctccacagcatggctggcgttcctcgactgccgccggagccccgggaagacaggcttgaccccgtgcacacacgcagggagacgccaggagccctgccctcagaagcctgcacgctttgcctctcttctggcagctagctaaccctgcatccccacctgagcctgtccctggcactgaggacactggacctgtgtcactggggtggggtgtcctgggtcctgctgggtgctgagtgtctccatgccaggagctcccgcctctaccatcgagatgaccacagatgtccccagacgtggcctggtgctccgtggaaaactgctgtccacaaaccatggcgtccttcccctgacccccgccccttccctctctggcttggcccagcgggtgtctcagaacctgggtgcgtgcttctgccagccccccaaccacctggcccacactccccaacccccttcactgagccgcagagacccccatgtccctgccaatgctttttccgaagccggtctcacttgttcccgccctggcagtgtgaggggaattggggtcccccctcagtggcacagctgtgcctgtctgatgacttccaccaagcccccttcactgagctgcagagacccccatgtccctgccagtgctttttccgaagccagtctcacttgttcccagcagtgtgaggggaattgaggttccccctcagtggcacagctgtgcctgtcggatcacttccaacaaggtggccttggtggccgcacggggcacttcgtccatcttaaaggggcaacacaggcatgcagcgagaattccaaaccacagaaacctcactctcatgggccccactgcctgaggcattttctgttttgcttttgttggtgggttggttggttggttggttggtttgagacagggtctggctctgttgcccaggctggagtacagtggtgcaaacgtggctcactgcagccttgacctccctggctcaagcgatcctcccacttcagcctcccaagaagctgggaccacaggtgtgcaccaccatgcccggctaatttttgtgcttcttgtagaaatggtgcttgctgtgtttccgaggctaagtgatcctcatcggcctccaaagtgctgagattataggcgagagccactgcagctggcctgcctgagttcttgtgcctctctgcctccctccctgtgccagcctcacgccccctcctcaccttccccaattcctactctcaccccgccctgggtccttcccctctcactggcctgagctgtttctggaactgctgcctgccctctgctcatgtcctgcctctgccccgtgaaaccagctcctccatgttccctgtctcaggggtgtcctccagggcccggagttcctgaaccagattcttctccccacctacctcacctttctgtccagtccgcctatcagtcagccccctttgcagcagaatgccaccccaaaacccagcgcctggaacattctccacacagtttctgtggggccgggatctaagggcagcccggccaggggcttctagggtggctcgtggggctgcagtccacatgctggttggggccacatcatcagaaggctccaacggggctgggggtctgaggagcctcgctgggggcagcagcccaggagccacagcagccgcccatgaatatcaccgccattctgttggtcacacagagcagccccggttgaacgtgaagaccctataggggctgggcttggtggctcacacctgtaatcccagaactctgggaggccaaggtgggcagatcacctgaggtcagaagtttgagcccagcctggccaacatggtgaaaccccatctctactaaaaatacaaaaattagccgggtgtggtggtggatgcgtgtaatctcagctactcaggaggctgaagcaggacaattgcttaaacccaggaggcagaggttgcagtgagctgagattgtgccattgcactccagcctgggggacagagcgagactccgtctcaaaaaaagaaaaaagaccccataggaaggcaagagcctgaacagcaaacgcaagcccaggagccctgtcatcccagcggccagaggaccatcccccttggctcccactgaactcagctgcagtccccaccccatcccccaccaccactagggctaagagccagcagaaatccttgggctggcttcattgttcctcccgggaagagtccagggcagctgacacatgatcccagcatggcacgccggggacaggggaggcactctgctgtccctgactgtatttaaaaaaaaaaaatccacaagcaaaatccctaatgagcaatgttccacagtaagtcctgcctcagaactgtgcaggcatcagaaacaggaatgcctgagaaacggccacggtcccaggagctgaggaaacaccacgcctgatgccacgtagggtcctggatggagccctaggccaggaaagggcattagaggaaacccaggaaacttggatagagtgtagattttggtcagtaataatgtatcatgtgacaaatgtatcacactcatgaactgggcatggggtactcacaactctaaattattctaaaaatattgatataaatttaagaccaaaaccatggccaggcgtggtgcctcactcctgaatcccagcactctgggaggccgaggtgggcagatcacctgaggtcaggagttcgagaccagcctggccaacaaaccctgtctctattcaaaatacaaaaactagccgggcatcgtagtgtgtgcatgtaatcccagctactcaggaggctgaggcaggagaatcacttgatccagggaggtggaggctgcagtgagctgagatcttgccactgtactccagcctgggtgacagagcaagactccatctcaaaaaataaataaataaaaataaaaccaaaaccctacagcacgggcagctatgagaactagagaaggaagagggttttgtgcacctgccagcctcttaggttcttgtcagcttttcccccaagtctttattattattatgtattgtagagatggggtcttgctatgttgcccagactggtctcaagctcctggcttcaagtgatcctcctgcctcggcttcctaaagtgctgggattgcaggtgtgagccaccatgctgggcccctccaatccttttgagctgcccaagaacagagaccaggcctggctttgctcagcagtgggtccccagcccatggcacgaattcagtaaacacttgttgtggtcctcaaggggcccccagtcttgctagtcacctgtgttcacctaatttgagcctctgttttctttactttttctttttcttttttcttttttttttttttttgagatggagtctcactctgtcgcccaggctggagtgcggtggcacgatctcagctcattgcaacctccgcttcccggattcaagtgattctcttgcctcagcctcccgagtagctgggatttagatacagggtttcaccatattggccaggttggttttgaactcctgacctcaggtgatttgcctgcctcagcctcccaaagtgctgggattacaggcgtgaaccaccgcaccggcctttgcctctgtttttgtaatcataaaacaggcagacaaaacctccagtggaattgtgaaaattaaatgatatgcatgcagaaagcgttctgcaaactctgttttgctagtttgggtgtttagtgttagtttttatatcattagtactggttgtaaacttatcaatttaagcaagatggaaaatcgagggtgtgtcagggaagggggaagtttgagctgaaattatgacctcttaggggtgggaagaggaggctttggggttgtgaggtctgagcccccttactttgggatgagtccacatcgcggcgactcctctgcagaatgcggtgatgttgcggtaaggggtccgggatagctgcgaggcagctggaccaatcctgaacgaaagacatcagtgatcgcaagaggcgctaaaacttctgccgaaacccgggatcgaaccagggacctttagatcttcagtctaacgctctcccaactgagctatttcggctgggcggcagagtcgctctcgccgggactccgtcccgcgctgcgccttccctgcgcaggcgcagtcgtttcgcgtcagcaggccccacatcctttgtaaggtctcccagggcgccggagcgcagtgtcgtctctgtggcgcaatcggttagcgcgttcggctgttaaccgaaaggttggtggttcgagcccacccagggacgcgtggtgacttttgccctcctggaataacaagaaaatgagtgtcgcctctgtttttgtcggtccgccgcagacccgcggcccccacgtgcgcactccgatgacctttccgcctcgggtgatctgggggtgcacggcgcaacacgaccacggaggccgaaagcgcagcggaacctcccggctccaggttccggtttccgcatgcgctccgagccgctttgggcggcggccccgggaacccggagcgctaaggagaacggacctcagaggttgtctgaaggccgaggccaagatggcggtgctgtcaggtgagcgcggcaccggcggcgggtgtggggccgcgcgggtctggggccgtgggagcctcgggtgtcgtggtggcgtcgggggtcggtgccggcgtcgtggccgcggtcctctccgggcttctccgagccggccgctcctcgggctccccgcccggcttgcgatgaacggtcgccgttattgcgtccagagtacagtcggggaaaccgaggcccggtaggtcatgacgcaagcctccagcctcaggaaggcgctcggggtggaggctggaggggccccattcacgtccccgagaccagggcacggcccgcgaggctgctcttgagatgccctggagagagcggggcctgcctgacaggctgggaaactgaggcccattgagggtcttcgaggtcacagggccgggcctgggaaggaacaggacccaggacatccacgccaccctgctggaccctccacctccctccccacccctgggaggtaagggcctctcgcagagcctgtcctgctccagggacttttttgggatcagctgaagcctgcggacctctgctcagataaagttattaaatgcatggaataaaatccatagaattgcaaggaaatcagttacacggagaggcagttattaaaagattgtcttgaaacctgattggcgacttagtaatctaagtgcttcccttatgaacgcgatctagcggcaggtctaattgcgactgtgatttggaaggagtgaggagtggaaatgaggctttgatgatacggaaacgtctgcagcccctgcaccatagctaggaaacatctgtgattccgcttggtgaaaagttacaggtcctgctaatactgccgtattttgttgtctatgctaagaattttttatttatttattaagacagggtctgcctctgtcgctcagactggagtgcagtggtgccatcttggctcatcactgcaacctgtgcctcccaggctcaagcgattctggcacttcagtgtcctgtgtagctgggaccacaggtgtgcgccaccatgcctggctagtttttgtatttttagtagagatgggggtcttgccctgttgcccaggctggtctcgaacttctgagttcaagcaatcctcccacctgagcctcccaaagtgctgggagccacggcacccagcctacgctaagaattgaatgaagggctaattttccataagatgctggtgacaacaaagacatatatatttttttattccaagcaaattcacagttctgaatcctcaccaggccccttgttaagaatgcctggcccacgcgcggtggctcacgcctgtaatcccagcactttggaaggccaaggtgggcggatcacctgaggtccggagttcgagaccagcctggccaacatggagaaaccccgtctctactaaaaatacaaaatcagctgggtgtggtggcgcatgcctgtaatcgcagctactggggggctggggcaagagaatcgcttgaacccgggaggcggaggttgcagtgagctaagattgcaccattgcactccatcctgggcaacaagagtgaaactccgtctcaaaaacaaaaacaaaaacaaaccagctgggcgtggtggctcaggcctgtaatcccagcactttgggaggccgaggtgggcggatcccctgagttcgggagttcaagaccagcctgatcaacatggagaaaccctgtctctactaaaaaatgcaaaattagctgagcgtggtagcaggcgcctgtaatcccagctactcgggaggctgaggcaggagaatagcttgaacctgggaggtggaggttgcagtgagccaagattgtgccgttgcactccagcctgggtgacaagagcgaaactccgtctcaaaacaacaacaacaacaacaaaaaccctgacccagaggcacagaatcccatcacctcagaggttctcagaagagtatctcctctgctaggagctcatccaaagtcctgcattttcagcttgggaaactgacacctggagtggggcagctcccaccagagcctggggctgggcagttagcctgtctgctgtgcccagcctcaggcatgccaagaagtaggtcacaggcttgtgtccttcagagagttgtggcctggacggggccatgggaaacagcaaccccggatgaggctaaggctggggtgagggaggggctcagaggcaggagaaggccccatggatcgctgcattcaggggcatcaaaccctggccctggcccctggaggctgcccacagcctctccatcgggcctcacctcacccacagcgacaaagtaccatcacctgggcagcttcaacagaagctgattgttctcacagttctgggggctggaaggccaagattgggggtcagcagggttggttcctgctgaggcctctgtccttggcttgcccgtggccatcttctccctgcgtctttcctctgtacatgtttgtgtcctgatcgccttttcttacaaggacataagtcatatcggatgagggcccaccctcgtgacctcactgtcctttataatgaccctttattttattttttgagatggagtctccctctgtcacccaagctggagtgcagtggcgcagcctctgctcactgcaacctctacctcccgggttcaagtgattctcctgcctcagcctctcgagtagctgggattacaggtacctgctactacacccagctaatttttgtatttttagtagagacggggtttcaccatgttgcccaggctggtctcgaactcctgacctcaggtgatccacctgcctcggcctcctgaagtgctggaattacaggcatgagccaccacgcccaggcattaatgatccctttaaagaccccatctccaaaagcagtcacattctgaggtcctggggttagggcttcagatgcaggtcgggtggagggtcacagttcagccgtcaccagcaccaagcctgcctttctggattcttccttgtgagccaggattcctggcacctccaggtttcctcccgctgagtgccccgggcgtggcaaggccctgctctggccttagtcttcgcctcgggaaggctctcccaggagacttcgtgcaggcgcgttccctcctctgcgcttcctttgaggctggctcctctaggggtgcttttctgtgtagattgacgtgggcagcgccctccccgcttagcggactgcagattcctgcaggatggggcctgtgctcagctgcgtgggaaacgcccgagcagcagccagggcctggagcacccagcacacgcttgtcaggcacagctgaggccaggacgagcactgggtgcccagggaggccccagcattgctggagtggcaggcaccccacaagcacgcatagatggagatagaaccgggtgccggcaaccggaggacctggggtcctggtgtaggcgggacgccccgggtatctgaactgaaacctgcctcatgagaaggggccagcagtgtgcaagtgtgaggcggggtgtcccccgcagggcagcagccagtgtgcaagtgtgaggcggggtgtcccccacagggcagcagccagtgcgggggccctggcgcaggaaagcggcaggtgccagtgaagatcgccagggcggggagacggggcagcgtttgggttccttccggggccatgcagtctcaagcaggggactaagactctctcgtgttctgaaaaccccctcgttacctaacgtttgttaagtggcactcgagttgggatcagagctaggctgtgcgggcaggagcctgatggggaagcgcctggaggccggccctgcgtgctgcccgcagctcactgttcccaccccgtggtcctctctgcagctcctggcctgcgcggcttccggatccttggtctgcggtgagtgcctgagtctccagccctcagctgggaggggccttcagcagcgacagacgaacggggcggggggggtggggggtggggggagcgccttgttgaaggtcacgtgtcatgttagggacaggatgcaggtgacggtctgcacgctgcccgtgatgtgccgggaccctccctgggacagtccacgcagtggcaaaggctggacagtcaggaggaaaaccctgtgggcccggctcagtgccgtcagagctcaccgccacctggggtgggaaggcattctctgagccctgtgcagatggcagctggggcaggcctcctgcagacccaggtgactgacagggcggtgagggcgcatgcccagggatcttaccttggtcatgtgtggagggcctgctgccagtttccttctgtggatgatcctgggaccgtccttgcttggacactgttgacctgctgggtacgtcacaaaagaagttccattcaagtctgggccatcattgggggtcggggcgatggccgcatggctccagcggctctggccagtggcccaagtgttgacaggcagaggtgagaacagtctcgcagcagggaggggagaggcaggacaacagtgagtgcggctgggggagctggaggggcctgggacagccactgacccgcgttccatctcccggcagctccagcgtgggcccggctgtgcaggcacgaggtgtccatcagagcgtggccaccgatggcccaagcaggtgaagctggccttctgggggaggtcgtaccccctcgccccacccccatcccttccttattttctgcatcagtgccgcagccactgaggtgcatggatggggcagggagggggtcacacatcccagtccctgacctcatgtgggtccaggcctctggcagcggccgtgggggctcgcatccgcctctgggaagcacctgcgtggctgacgcctcctgtgcccgtgtgtctctgtgccagcacccagcctgccctgccaaaggccagagccgtggctcccaaacccagcagccggggcgagtatgtggtggccaagctggatgacctcgtcaactgggcccgccgggtgagtactatgagctgtaggccctcctcgagcgccagggcctctctgcacactcacaggcacacacatacacacaccaacgtgcagacacgtacacacacaacacatgcatgcacactcacatgcgcacatgtgcatgcaagctcacatgtatggacagatgtgtacacggaccacacgcacactcacgcacacaatgcacatatgcacactcgcacacatgcacacttgcacacacatgcacacacaagcacatgtgcacacacgcttgcacacatacacacatgcacacttgcactcatgcacactcatgcgcacatatacacatgcacacgcacactcgcacacacgtgcacatatatgcacagtcatgcacacacatgcacactcacacacatgcacacacgtccttgtgtggacacatgcatgtgtgcctgttggcatgcatgcacacaggcacactcactgatgcacacacacccctgcggccgtggagcagggcggaccctcccggaggcccctgtgctggcctggtggcctgtggttccatctgaggattcggaccctgctggagatgacccctccgtttccgtcattctctttctggcgtccgtgtgttcctcttgtttctcttttaaggtgaaagcagtgttttaagttaaaaggagcgcgtgtgaaggcagtagatccttctcggtacccgtttaaagcctcccctgcctgtggcgccagcccccacgcagcccctgccatccccctgcagcgtgagcacgtgcagctccctccagctcctgcggcacttgctgcgacagcccgggttcaacaatcccccattgatggacgttcactgtttccttttgttttttgtttcctaaacaatgccacggcgaacgtcctgccagggccgcagtggtcgagacaaggatagtttttaatgcaggatagttcttttctttttcttttcttttcttttttttttttttgagacggaggctcgctctgtcgcccaggctggagtgcagtggtgcgatctcggctcactgcatgctccgcttgccgggttctcctgcctcagcctcctaagtagctgggactacaggtgcccgccaccacgcccggctaattttttgtatttttatttttagtagagatggggtttcaccgtgttggccaggatggtctcgatctcctgacctcgtgatccgcccacctcggcctcccaaagtgctgggattacaggcgtgagccaccacgcccggctaatgcaggatagtttctaatggagggaacctgagacatggccagcggccgtcccaacacaggcttctggcgggcaggtggacctggccatttctgcccgggcagccctgcctcactctgtagcctgaccctgtcacccgccaacacatgcagcagggcccctgccaggtctcagagccgcgtgcagggagagcgggaacggtgggggaaatgagaagccacagggatggaggagaggggagggagtggccaaggagatctgagagggcttcctggaggcgtcgcacttggtatgtggacccagatctagttaacgcagagagttcccggttagacctgcgctactactcgcctgtagcccacgcgctcagagagtggctggagccccctgttgaaatggtgggacttaggatacactgggttcgaggaactatgtgatgaggacagatctcacccgtttctctctattttatgtatttgaatgtggctggtggggcgcgctttacaactcttggggcccggaggccacctgcaggagccgctgtgcctctcacctctgccggctgccgccccgggacatgagtcgggggttctgggtgctccacgtggagtctcacgctgggccacgcggggctccgggggtggcgtctgacccgagcccggcctccgcagagttctctgtggcccatgaccttcggcctggcctgctgcgccgtggagatgatgcacatggcagcaccccgctacgacatggaccgctttggcgtggtcttccgcgccagcccgcgccagtccgacgtcatgatcgtggccggcacactcaccaacaagatggccccagcgcttcgcaaggtaggcctcgtcccagccgcccagccgcccccagagtgagctgcgcacggaccccgcctctcttccaggtctacgaccagatgccggagccgcgctacgtggtctccatggggaggtgagtgcagggcggggggtctccagggacagacgtagcgtgagtgctggcctggccgtgccctgatggcgcttatcaaaagtgtcatctacattcagtgaaatcccacgtggtcccggcgctgcccttcagccgtctcggtgcctccaccctaggcagatgcgctggtgggcctctccccagaacgattcctcccatccacccccacgcagcagaccccacattccgcccagttctctgctttactcacacataagtgatgacaggtgctgtagatagttttataatctcagccttctcacttgccattagttttttttctttttttttttttttttgagacagagtcttgctctgtcaacccaggctggagtgcggtggaaccatctcggctcactgcaacctccgcctcccaggttcaagcaattttcctgcctcagcctcccaagtagctgggattacaggcatgcaccaccacacccagctaatttttgtatttttagtagagacggggttttaccatgttggccaggctggtcttgaactccctcaggtgatccgcctgcctcggcctcccaaagtgctgggattataggcataagccaccacgcctggccttgccctcattttttagtcatttccccgtaacattgaaaggtatttagtctcttaacattttaaaatatttatttatttacttaaagatggagtctagctctgtcgcccaggctggagtgcagtggcacgatctcagcccactacaacctccgcctcccaggttcaagcgattctcctgcctcagcctcccgagtagctgggattacaggcacctgccaccacacctggccaatttttgtatttttagtaaagaagaggtttcaccatgttggctaggatggtctcgatctcctgatctcgtgatccacccacctcagcctcccaaagttctgggattacaggcatgagccaccatgcctggccaatatttattatttttattttttagagacagagtctcactgagttgcccaggctggagtgcagtggtgcagtcatagctcactgcagccttgacctcctgggctcaagcggtcccccaaccttagcctctcagagtgctgggattacagatgtactccactgtgcctactttttaaaatttctgtagagatcaggtcttgataagtttacccttttaaagcgagcagttcagtggtttttaggccaccacctctaattccagaacattctcatcacccccaaatgaaatgctgtccccatcagcagtcactctgcatccccttccgagccccggtgcccacacctcccctccctgtctctgtggatgggcccgtcctggacatttcacagaaacaggatcacacgccgcatggccttctgtgtccggcgtctctcactgagcgcgacgtcctcaaggtgcatccgtgctgtggcctgtgtccgagcctcgtgccttttcttggctgaataatatcccactgtgtggacatattactaatctaattctaaacagttaattagaatattccagagttttcataaccgtctcccactgctgggcattcagggtatgtccatttttacggctgtgggaagcagtgctgggagtggagtctgtgtggtctcctggggtttccagctccctgccccgggtggaccccagcgcctcactgacagagccggaatcaggcgagggtgaggctcagccgccccatagacaggggctgggtgttggcactgtggctgtctgaagtggctttttgttgacacatgtgatctgacacatcccagccccgggaatcggtggtcaggagccccctcgggaggggagcacttttccccgagttatcagccacgtgtgagcttgcgccccactggtcccacagaggctctgggagcctgtgcgtgtttgctcattgcttctccgtgacaagttccagcctcgtaggtgcctggcctgcagttgaaggcgggtggggatggggcgaggcctcgtggagggagggtgggcaggcgggtcttcggcacactcccctcacggtgcctccccaacagctgcgccaacggaggaggctactaccactattcctactcggtggtgaggggctgcgaccgcatcgtgcccgtggacatctacatcccaggtagggccgggaccgcaccgcccacgagggagctggagacagggccagcgccacacggagcccggcggcccctgtgagggagtcccacacccccagcagacggcgggctcccccatcctatggatgggccgactcggagcgctgcctcttagtggagcctgtcccctgtgagaagtcggcgatgtattcaggcatcagagggatcagagggagcaggggaagctgagtggaattcctgacacacgcctggtttacagcagtttcatatggtcctacctggcacaaaccaaagacctgcagttagaaataccaagcgagaaggttcctgggggccaaggacactgtcccgcgccctcagccttacagaagggcacgcaggactccctgggacccggggtggccggatttggcaaatgaaaacgtgggaggcttagtttgactgtgaggttagggtgaatttgaccatcaggaaaactgttagtagtaattgtttagtacgagtatatcccaacaatatttgggctatactgacactaaaaagagcattggctgcatacctgaaattcacatcgcaccgggaacattctttatatctggtgatcccgtgggactcttgcacctcacgtggtcccacgagggccatccccccgggcgttcaccttgacagtggtccacggtaggcaggcttggaggtggcgctcatgtgggacaggggacagagtcctgttcttggccaccctgtgctgcgtgcggcattagctcatgcgcagagagcccagccctgagtcccgagtctgggggtttgggcaagcgagaggcacatcctggtgcctctcaaaagtggaggaacaggctctgactttggattccgcttccctggaaagggcgttgatttgttcagcgttctgcacggttcaggtcaccccgggggcagtggagagggcagcctgggcctccctgtgacttgacagcacagagaggtccatcctggggtcaggagctctgcccatgcccctggcgtcttcccctgcagtgcagaccaatggggcaagttgcgagtgtggactgtactcctccctccttgcagactgagctcctccctccctggggaccgcgctcctccctccctgcggactgtgctccctgtctggggactgcgctcctccctccttggggaccgtgctcctccctccctccctgcggaccgcgctcctccctccctggggaccgcgctcctccctccctgcggaccgcgctcggccctccctggggaccgcgcccctccctcccagcggaccgcgctcctccctccctggggacctcgctcctccctccctccctgcggactgtgctgctccctccctgcggactgtgcttctccctcccttggagcagcctggacttgccagagctctgccaggtggggcctggccgccctttcccaggccctgcagtggccttgtcctttctcacctgtttccactcctgctgtccccgttgggccctgggcttcgtcctcttgctcaagccctttgttctgaacctgcgtggcagccgggactgggggatccccagcaaagagctctggcttggggctcagaaagagggtcatcgggtcctcgtgggatgcccgggctctgggccacctcccctccctccgcccagcctccctgcctccatctccgtccagggcagccccgggccctgctccccactgctaagtgtgtctgctgagcgctggcccccattgagtcctgagggctggggccgggggccgggttagtgaggtcagcgtcttgtccgagaggtccctgtgacagcccgggatgagccacgggtggagggcagtggggccttgcccaggggaggaccccactcttcctgcagggacctcccctgcgccggctcccagtccctggcactgcgcccacccagggctgtcagcctccaccttcagaggccggcccgggaaacccttccaaagccgagccggctgcgctgtgcacgcggtcacgcgggctccggctgcgggaagcgagactgaggcaaggtccctgcaggctgcccacctacggccgaggccctgctctacggcatcctgcagctgcagaggaagatcaagcgggagcggaggctgcagatctggtaccgcaggtagcgccgccgccgccgccgccggagcctgtcgccgtcctgtccccagcctgcttgtgtcccgtgaggttgtcaataaacctgccctcgggctgccgcctcccagtgtggtgtgtgggtgaaaggagccggggacgtggggggatcacagaccccctgcggcgtgccgcccttgggctgggggcggttggagcagagccgggggcagagacgggcactgtgcctgccagcagggtcctttcccgctgctctgcgaagaccctggggtggacatcgtggcccaaagtcccgagcgtggaaggccgcacacccatccttcctgggagggccctgactcagtctccctctatgccctaaggcaggctgagcaaagcccgtctgagcctgccccggggttcagagtgtggcctgtggcctgcgtgtggacttgggcaggtcgccactgccctctggcccatttccaggcggtggcatgggctggttagctgagggctggggccagggagatggggaggtggcacctggtccaaaccaaagggctgcagggcaggactgtgagcctcacaggctgtctgaccccactttggggaccctctccacccagggctttcggggaaccctgactccaccccaccagccccttcatccgtcgaagtccaggcctcatcagggacgtgcattcattcagcaaacgtcccatcttcctgtgttcagcgccagatgccgccggtgctgggacctcgctctgcaggcccaccctgcatgcctgctgcacaccagggacagttctggggatcggcagttatgacgggccaggctgggatggggcccgggagactggggcgggggtggggaagaggcacccagcccagccgggtcaagcagcctggaagcaggacatgctggggtggggacagggcgtcagccagcggaacagcagccctgggccagagtgcagagcacaggagccggccttctctcagggcaaggaggtcagtggagggggcgagcaggacggccccaggaagatgggcgggctgcacacatgtggatgcagggggcaaagtgggaggcatggggtgaccagctgggcacaagggcacagacaggcaggacccgggatgttcctggggctgggcaggtggggctgcccctgcaatgggcccagcaggggcgatgcctcctgagaggaaaccacatctggaaatgggaggcttggggaacggggctgtcagcagccacgcccctcctggggcgggaggaggggagctcagggtgtgctggggcgggcagagaagtgggttcctgcctggggtgggcaaagatccttgtcccacccacaccccggccgtggtgctgccaccccctgagaccctgacctagttacccccttccctgaccccactgcaaagggtcaggtggctttcatctgaggaagggacatcgggcatcagctggagatgtctgctatgggcaagacagtggggggggcggggcggatcctggggccgctcagaaacctggaggggagtcacccacttttcctgtgtccatgggatgggcgggaggtgagggagcagccgctggaagtaacagtcgcacgctcactgccgactggccaagcccagcgccggcgtttacttcacctcagggaccctgcagtgggcagcagtgaccctcacagagaagctgggaaagctgctggtgacacacagctgggatcagccctgggctggtgggacccctcacagagaagccgggaaagcttctggtgacacacagctgggatcagcccagggctggtgcgacaccctggactcccggccaggaaggcacggaggagggcatgggtgtggccgggccggggtgggggctcagcctttggtcaccaggggcgtgatcatctgtgggaaggcgtagtagcggcagtcggccggtgggaccagcgccatcacctccgtacggatgttctccctccggaagccggcctccagcagcgcgggcacctgcgtctcctggtcggggatggcaccaggtcacctctgagggccatgggggtcacgtgcaccctggcgcccacccctcattgaagagtgtttacagatggcaaggcccgggtgggcggctgcagctcccgtgggcacgtggcagggcagccctggaagcccaggtgtgaacgggaatctccagctccccagtgcgggcagcagcttcccggctgtcctggaaccccagccccacactcgagccacccccgggcacctactccacagttctccagaccttgccagtgtggcgggtggagccaaagaatcacaccagaaaaagaacacaggccactagttcccattttggaagaaaagctgccccaggggccacaggcacccagccggctctcacaacagcagcccagggcaaccacatagagcccttctcagataggccgcctccaccaggcagagggaacagcgagacaagcactgctgaaccagcaaagacagccaggtggaggcagctggagggaggggaacacgcagggcttaggctgaaccacagggcactggggagccatgggaggttgttgagctggtgagggactttgatttccattttttttgtttttgttttgttgagatggagtctcggtctgttgcccaggctggagtacaacggtgcaatctcggctcacagcaacctccgcctcccatgttcaagtgattctcatgcctcagcctcccgagtagctggaattacaggcgcccgccaccacgcctggctaacttttgtatttttagtagagatgggattctgccatgttggccaggctaggctcaaactcctgggctcaagtgatccacccgccttggccttccgaagtgccgggatcacaggtgtgagccaccacgcccagcctgatttccattttttttttaaattttctttctttctttctttctttcttttttcttgagacagggtctggctctgttacccaggctggagtgcagtggttcgatctgggctcactgcaacctctgcccctggggcccaagcaatcctcctacctcagcctcccaagtagctgggagtacaggcacacgccaccacgcccagctagttttttgtattttttttttttaggaaagatgaggtcttgctctgtagcccaggctggtcttgaactcctaggctcaagcaatctgcccacctcggccttccacagtgctgggattatagacctgagccactgctcctggcagccactgcgccaggcaaaggactttgatttctaaatgaaccagcacagtccagcccacccagggggtcaggaagggaccctccccaggtagcaaggtggctccagcagccccttcccacccccatccaaggtcacttcctggagacccatggggaacttcaggtgggcgcacctcaaacatgatggtgatgtctgagtacttggacttcatcagctccccccaggaggtgaggttgcagtaggtgaggacgccccccggcttcagcaggcgaaaggcgtggttctgtggaaggggagtggccagtggtcaggacggaggtgggggtgtgggcagaggggcttccccgagggcctcccgcatcccagcaagtcagagagaaccaccttgatgaagttgaactggtgtgtgtgccaggtctcctccgagagtgggtacgtgtcgtacaggatccctgcacggagaacagaagcccacgcggtcagggccgggctcagcgcctcacccagcctcacccggctcatcccccagcgggtggaggtgcagtgagacggggccgtgggtagaggtggggctcccacacaggcttgagaaccccgagatcgcctccagggcccctccgtgagcatgcccatccccggtgctccgccatcccacagccaggcccacacccacttgggctctgtccccccagtgcacatcagagggacccccacaagcaaaggaggggctgcattggagctggggaggcccaccctgtgatacgtcccctcacccctcaccatcaaagtgaccgtcaggcagggtgggtgccacatcctcccacaggcctttcaaggggatgaccttgcagaggggaaaagaaaaagagaggacagggtagagaggtccccaggatctccccacctgcagaaagggagcggccagggggactcccgagagagaagaccacctcctccacctctgacagccccaggcccccaacccccaggaagcagtgccctcaccccaaggagtgggggtcctggagggcctgcgggcagaggggcaccttgtgtgtctgccgtggggcccagtcccggagccgctggaagacgccgtcattgcactcgatgatccaatgctcatcaatgggcgcctcctgcacctttgacgctgcgatggccatgccaaagcccacctccaggacccggccccctgggcagacacagggcgcctggcatcactaggtggggcgggcttaggaggctgcctggaggaggggcacagggcagggcagggctggggagactgcctggaggagggggcgcagggctgggctgggggtctgcctggaggggggcgtgcagagcagggctggagaggctgcctggaggagggggtgtggggcaatgctggggaggctgcctggaggagggggtgcggggcagggctggagaggctgccaggaggaggggatgcagggctggggaggctgtctggaagagggggtgcagagcagggctggggaggcttcctggaggagggggcacagggtagggcagggctgagctgggggtctgcttggaggagggggtgcagggctgaactaggctatgtgagtcacatttgccacaggacgggagggcaccctgggccagcatggacagaggcgggcggaacacagtagtcctgagcgggaacagcgtgggccctggccagcggccagagagaggatgaccagccagggaggccgaagacggccgcttttggggccaggcctgtggggaggcgagagccttggactttgagcccagcccacgctgtttgtcccgggtcccttatctctcgggttagttacttttctctccccctccctctatccgaaagttggatttgcaagagtggccaggcaagacctggacttgagactatctgggaggggaaggactggtccccagtgggccacacatgggccccccgctcaatcctgattggcactggacactggacgtgcccattttcagggtgggaacactgaggcccgacccctggacggggcctgtgtggggccagggagtcctttcttagcagcccttagcgtctgacgccaggcaggccagggccaccccggggacagctgtctccctgagctcagctttccgagtgctattcttagccgggcgagtcggggctgctctcccaggcaggcagaagggcagcctctccctggcacgaccccttcctcccgacctcagacagggagctggggacccggttccacccagtttcacccaggtctcacgtttgaggtccccatctggagagcggggggcctcactccccctggagaggaagtttctggtacttaggcggtgcctaacgtgtgcgggccccacgcctgccgcactccccgtgaacgcctccgtgtgcccccacctgcagccccacttcccaggcgaggagacagaggcgccccggcgggagggtgggctgcagagtccccgggtcggggcagccccggcctcagtttcccctgcgcccccgggggcggtgcaggccgggcgggggctacctttggaggaggcggcggcggccagcgcgtgcatatagggggtctcccagcgctccatcaccggcttgcccaggatgcgcaggtgcgtgtccgctgcgtcgtaggccgcgggcgccgccccccacgcggggctgcagttctcgccgggcgcgaagatgggggtcgcgctgggggcgctcatgctgcaggctggacggcgacccgacctcgatcgcgcgccgcccgggcccgctccctgcaggggcttgtgggccgggggcgggtccaacaggcccggggggcggacccgcgagaggacgcgcgcgcgcggctccgggagcggcctctagcggcggccacgcgagaggtggcgggagtggggtcggggccccggccgccccctccccaaggagcctcggtgccccctctgcggagcgggcaccgcagccccgcgcccggggacgcgaacctgcaggctggggactggaatccccgccttgccgcttacgcgccatagattcctcatctgtcagcaccgcagaaaggccccctcctcgctggggtgtgagaatctgaggatcttccaggcgctgttggaagtgctttaagtgtttaaaatcatttaatcttcagaagatgctacagtgagttctgtctttttttaatagagacggggtcttgctatgttgcccaggttggtctcaaactcctgggcgcaagcgatcctcccgcttcagcctcccaaagtgttgggattacaggcgtgagccaccgcgcccgccaggttctatgatgactgtcgtttttccttccttccttccttcctttcttttttgaaagcaagtttattaaggaataaaaatgaatggctactccatagagcagccgactgtcattttacagatgtggaaactgaggctttgagaagcaaagccggtggtctggtggccacgagggtggggacccagcattagagctctgatgcccccctttcatgagcccatgtcacacccccataggctgggggtcatctgagaccccgggtccctaatgggggattccgcccaaagacgcctccagttctggagaccaggactcaatcccagcagtgccctttcctccggcggccctgcagctggggtgtgcgggggtggaattaggcctcccccagcccagggtagccccttagggtcaagcacaccccccgcctgtttcctgggggcccccaagcccgctgcggtggcgtcctggctctgatagccggtttccttccccctctgaacgtggggccacagtcatgagccctgagcactgcctgcctgcctgcctgcctgcctgccgtgcgttctgcacgggttaacagatgcagttattatgcccatttaacacgagggaaactgaggcccagagaggttgaggttcacaggttgcagcagggccacggtgtgaacgcaggcagcctcggaaacagctcccgcgcgcggccttccctgcgccaccttgtctgggtagctgcctgccccatcactgcctgctcaacgcctccacatgcccctgccacctcttgcacagctccttagccccgggccttggcacacgctcttccccttgcccagacagcctctctcctggtcaggccgctttctcgttctgtctcaagctgagcccacgtgtcctctaggagacacccccattctgccccaggacaggcatgtcctggtcagaagctgttttgtttgtttttgtttttctgagacagagtctcactctgttgctcaggttggagtgcagtggcatgattttggctcagtgcaacctctgcctcccgggttcaagcgattctcctacctcagcctcctgggtagctgtgatgacaggcgcccgccaccaagcccggctaattttttttttttttttttttttttgtatttttagtagaaacggggtttcaccatgttagccaggatggtcttgatctcctgacctcgtgattcacccgcctcggcctcctaaagtgctgggattgcaaggtgtgagccaccgcacccacccggccagaagctgttttctctctctttggtagttcactaacggaaggtatttcttcatggtcctagcgtccctctcacagggctgtcagtgatcctggcacacagaacatgcttgataggctgggtgcagcagctcccacctgtgatcccagtgcctgggggaggtgcaggggctcaggcctgtgatcccaccactttgggatgccgaggtagaaggattgcttcagtgcaagagttaagaccagcttagaccacacacagagaccttgtctctacaaaaaaaaaaaagttttaaaaattagccagggccgggcgcggtggctcacgcgtgtaatcccagcactttgggaggctgaggtgggcggatcccctgagaccagcctggcaacacggtgaaaccccatgtctacaaaaatacaaaaatagctgggcgtggtggtgggtgcctgtaatcccagctactcaggaggctgaggcaggagaatcgcttgaacccgggaggcggaggttgcagagaacatcactctcagtgaaataagccagtcgcaacaggacaaatcctatgtgagtccactcctaggaggtccctggagtcctccgatccacagagacagaacgtaggatggcggggggggggggtgccaggggctggggaggggacagggagtgagtatttcacggggcagagtttcagtttgggaagatgagaaggttctggagaggacggcggtgatggttgcacaacaatgggaatgcgcttaatgccaatgagctgtgcacctacaaataattaaaatggggccgggcgtggcggctcacgcctgtcatcccagcactttgggaggccaaggcgggcagatcacctgaggtcaggagttcgagaccagcctcaacatggagaaaccccgtctctactaaaaatacaaaattagccgggcgtggtggtgcgtgcctgtagtcccggctattcgggaggctgaggcagaattacttgaacctgggaggcggaggttgtggtgagccgagatcgagccattgcactccagcctgggcaacaagagagaaactccatctcaaaataaataaataaaataaaaacaaaaataattaaaatggaaaattttatgtcacatatattttaccacaagaaaaaaaggggaccaaaactacataccgtgtgttggatctgtttatagtcacactgggagtaaattcagatcagtatctgcacagcctttttctcgctgcctttgccctggagtggaaggaaggaaatgaatggggaagagggagaagcggagaagtagcctcttctagttctttcttccttccttttttttctttttcttttcttttcttttttttgaggtggggtctcgcactgtagcccaggctggagtgcagtggcgcgatctcggctcactgcaacctgcacctctcatgatcaagcgattctcctgccccagcctcctgagtagctgggattacaggcatccgccaccacacctggcttttttttttttttttgagatggagtcttgcactgtcgcccaggctggagtgcaatggtgtgatctcggctcgctacaacctctgcctcccgggttcaagcgactctcctgcctcagccccctgagtagctgggattacaggcacccgccaccacgcctgcctaatttttgtatttttagtacagacagggtctcgccatgttggccaggctggtctcgaactcctgacctcaggtgacccgcccacctcggcctcccaaagtgctgggattacaggcgtgagccaccgtgcctggcctgtattttaaaaaatatattatttgtaatcagcttgtgcccgacttccttctttgggccacattctgtgcatttcatccacccactgcttcattgttcatttatccagtcaccaatagatggatgtgtggttatttcaaatgttccagtcttgttttgttttgtttttgatagaaacagggtcttgccatgttggccaggctggtctcgaactcctgacctcaggtgacccgcccacctcggcctcccaaattgctgggatcacatgtgtgagccactgagcccagattttttttttttttttggcagggtttggctccgtggcccaggctggagtgcagtagtgcgatgtcggctcactgaaacctccaactcctgagctccagccatcctcctgcctcagcctccaagtagctaggactgcaggtgcgtgccaccaaacctggctgatttttgtattattattattattattattttttgtagagatggggttttgtcatgttggccaggctggtcttgaactcctgggctcaagcgatcctctcatctcagccttccaaggtgctgggattacaggcatgagccactgcatccggccagttttattttaaatggggttttagtcccagctacttgggaggctgaggagggaggatagctggagtccaggagttcaaggctgcagtgagctatgactgcatcattgcactccagcttgggcaacagagtgagagcctgtctcaaaataaaagaaaaaaaagtgttttgtactatttgtctgtgatcttgttccttgtattttttttttttgagacagagtcttgccgtgtcgcccaggctggagtgtagtggcacgatctcggctcactgcaagctctgcctcctgggttcaagcaattctactgcctcagcctcctgagtagctgggactacaggcgcctgccaccatgccgagctaattttttgtacttttagtagagacggggtttcaccatgttagccaggatggtctcgatctcctgacctcgtgatccgcccaccttggcctcccaaactgctgggattccaggagtgagccaccatgctcggcccttttttttctaagagggagtcttgctctgttgcccaggttggtgtgcagtggcgcgatctcggctcactgcaacctctacttcctgccttcaagcatttctccggccttagcttcccgagtagctgggattacaggcgcccaccaccacgcccggctaattttcttttgtatttttagtagagacggggtttcactatatatgttggctaggctggtctcgatctcctgacctaaattgatcctcggcctcccaaagtgttgggattataggcgtgcgccacctcacccggccttgttccttgtatttatttaattctgtgatgatgaataaaccaaacgatcaggctgtcaatgtgctgtgagattaaggagaaaagcagtaggcagcacgtacccggttttacaaaaccctgcgggtcacctgtttactaccgtcagcctagaccggtttttccacctccttctgctgacattggaggacgggtatcattctttttggggggtcgtcgtgtgcactgcagggtgctgagcggcatgtctggtctggacccactcgatgccagcagcaccccgcactcaagttgtgacaaccaaaaccgtgttttcagacattgccaagttatcccctagggggcaaagtcacccagaagaagaaccactgatgtatgcaattaacagatgcaactaaaacagtatttggctattaatagtaatagcacttggggggggggtcaataatatcttttcatagtcattgaatttagttaattgttttgatttgattccagttcagccccgaactgggtgaccttggccaagtgactcagcctctcggaccctcgggatcctcttctgtgaaatgcggacaggggaaggagcctcgcgcgggacgctcacgtgccgttcccgctccgtccgcccgcctggggtgcgggcgggtacactcccactccccgcagcgccccacgcggctccaccgcttccgagtgaagagttaaagaggaagcggcagccgcgcctgcgcccacagtgcctagcccggagcgccggtctcgcaagcgcgcacgcgcacgcaagcccgcacgcgcgcgcacgcacgcacgtggctcggcccgcgcgcatcctccccttgcaggggcggggccagcgcagggactccatttcccagcgtgccccgcggcaacgccaggagcctccgaggagaaaggaaaacgcgcgacggccccgactgcggcggcgcgaaatccgcctcagggacgcacgcacagacggagtacccctggacccgcccccggagaccccgtgcgggagcgcgcccgggcgtgcgcaggggcggcggcgcggcggcgcggggacgcgcggtgaccgttggcgccgaggggaggaggcagccgccgccgccgccgccgccgccgccgccgccgccgccgccgttgcgcagatccgggccgcggctgtggggagggcgacggagcgggtgaccttccggaggcgggagcgagcgaggaggcccgggagcgccgagcgtcgccgccgccgccgccatgaacaactcgggcgccgacgagatcgggtgaggacgagcggcgcgggcctgcgtctccgccccgagcccggcccgccgctccccgccgcccggcctcagacgccgccccccggggccgccccgtcaaggtcacgccggccgggggcggactcgggacccggactcgccgcggcttcgcgccgggggccctggacgggtgcccggggtctgggggggtcctggcgcccccgccgccgcttcccggcttcccgtcctgggggatcctgaaggagagcctgaggggtccggggggccccgccgccgcctccagacttcctggtcgggggaaccccgaacggcaacctgggggggtgtcctggggcgcccgtgccgccgcttcccgactgcgcgtcctgagggaccccgaatgggagccagaggggttcaggggcccccgccgccgcttcctggttgtggcggccccgaacgggaacttgggggggtctggagcgtccccgttgccgcctgtagggcttcctggcctgggggaccccgaatgagaacctgagggagtctgcggggagtccagggcgccgtcgccgccgcctcccggcttcctggccagggggaccccaaactgtggcgtggggggtggtccggggcgcccccagcgcgcgcccaaacttggcgggcggcgcacgtggcgagccgaggcgagggttccggttctgccaccgcccaacctatcccactcggggctccgggctccccgctcccatcccacccccccaaagtggtaaggtcgggaggggttcgcaaacccagggcccagggggctcgggtcagccggggcctgctgtgtttacgttgcctcggcgcctccccgccgggggtgggcttgagctgcggaagggagagtcagcgcttccgaggcggcgacgggcccgcggatctttgctgcgccgaggcgtcccctcctataggagcctgacctgctccggaccccgcggggccgggaaacctcatttcgctgtgccccagggctcggcgccattctttggtaggagcggctcctgccgcagcgacgtcgttttagagttgcattcttccggcaaaacagtctgggttgggtttcctagtggtctggtgtaaatttctcggtgcccttagctttgagcagcgccctgtgttctcagcgctgggcttggctagtgcgggagcggttgctgctagagggttgccttggcaggcgcctctcgcaccagctacaggtcacacttgtggatgggaaatgccttttgtgggctctccccctccccagacaaaacaaaagagcaccttccgttggagaaccaggatgaaagcacttagcccctgcctagcccgtgctgtgagtcctctccaggcactttgacttggcagggtccgtgtgcctgtgtgagggacattgcagggatgggcctgagcagggagtccaccggccatgggggatggagccatcgactttggggtgaggcagggaaagggctcccagatggggtacctggattaggtccattcaagccgcgggtgaacgtgggcccgctccacccaagccgtggctgtgaggaggctggagagaggtgagggctcctgtcccctccctgcatggacacccttgggaagtggggcagctggggtcccagcctgggtctggaggggtcccacccacagcacaaataggctcgcaggccacccggacgccacgggctgcgtggaggagaactggagtgcatggaccctgctctcctccccggctgccaggagtgtccactgctttctaagtcagactccttgggcaagaagtgttgccacagccgcccgtcgcatgggagaccggcttccattctatgcggagtccacggtctgctctgatcttgctgtgtggagttgttgtgtgcgtgaaatgcttgtgaccctgcgaagcgccctcctggcaagtcccctgcaggtgcggtgggtgccatgcaggagggtgctgagcttggatggaagcaggccctctctgcggcagatggcggctctcaggacgccatgggtctgcggtgtcccttacccactgggggggctcggcagcctgaggagctccctcttcctgatgcagagccctcactgctcactgccatggaggaggcaggagatcccgccggaccccgcttggagggctgggcctggagcatgcatgggtgcggggtcaacgcctcaggagacttggagcttgggagccccctgttctgggacacttgtggccgtccagctgctgccctgggaatccacacctggaaggtgggttagggagccatccttgggggaagctctgcttttgagtctgagaagtcgtcccaagttttgagggtccctgtgctggcttagaagtccatgtaaagcttgatgggggatgaaagtcagctgaggcctgccggtgataacggatgccttacacacaccgacttccagtcagcttgaggggggcttcatgcaggaggaagcgcatacgtgtggtggggtgtggggagtccctctctggatcctggtgggtttggcacgcggaccctacatggtggatgtgatggacagtgtcctcctttgggagcggggcctgtcctggtcctcttgtgaagggtgggggacaggcactgacctgtcaggagggttagagggttggcaccagcaggtggcctggagcgctcagagcacgcgcgatcaggaaggcccgagtctccagtgtgccctccctggccttgtgaagtcatcttaaagtctggcttgagcgcctctgacttggattctgggaagctgacacagcgcggccggggtcgccacatcctgttgagtagccgctgggtgctaggcgcctgggtggtagaccaggtgtcagggatagggcccatgcctggcctactggggagaggacagaggctcagaggggtcacctcgagcgcccaggccattgtgttctgctggcttccaaggcagcacacggtcatggaactggagagagaggtttatggaagattttatctggtacactggggaatggtaagacagggacacctggaaatattgtaggaaagtcacagagggaggaaggactcagcggagagaggagaaagccgcctctgggcagcttcgaggatacccaggactgtggccgggggccatgcagctcagagccaggcccatggcaggtctctgggtttattgggtggctgtggaaggagacatcctgagtggggctcctggctgggcccctagaggccgtgactacttgtacctgtgcagagtgagcacaaggcacctggcaagattgttggtcaggccagagagggccgtgatctgggggaggctgttgcagtgcggggagtgatagggaacctcatggggccgtgccggcctttctggggctctcttggtgcatttggagttattccgaggcaggtctcctgggctctgtcagcactctggcctggatc

SEQ ID NO: 317 - DNA, 3594 bp, Homo sapiens
gtggctcacctgtacccagcacttgggaagccgaggcgtgcagatcacctaagtcaggagttcgagaccagcccggccaacatggtgaaaccccgtctctactaaaaatacaaaaatcagccagatgtggcacgcacctatatccacctactcgggaggctgaagcagaatgcttaacccgagaggcggaggttgcagtgagccgcccagatcgcgccactgcactccagcctgggccacagcgtgagactactcataaaataaaataaaataaaataaaataaaataaaataaaataaaataataaaataaaataaaataaaataaaatataaaataaaataaaataaaataaaataaaataaaataaaataaaagcaatttcctttcctctaagcggcctccacccctctcccctgccctgtgaacgggggaagctccggatcgcagcaattagggaatttccccccgcgatgtcccggcgcgccagttcggcgcacatctttcgctgcggtcctcttcctgctgtctgtttactccctaggcccctggacctgggaaagagggaaaggcttcccgccagctgcgcggcgactccggggactccagggcgcccctctgcggcgacgcccgggtgcagcggccgccgggctggggccggcgggactccgcgggaccctccagaagagcggccggcggctgactcagcactggggcggaggggcgggacacccttataaggctcggagcgcgagccttcgctggagtttcgccgccgcagtcttcgccaccagtgagtacgcggccgcgtccccggggatggggctcagagctccagcatggggccaacccgcagcatcaggccgggctcccggcggcctccccacctcgagacccgggacggggcctaggggacccaggacgtcccagtgccgttagcggctttcagggggcccggagcgcctcggggagggatgggaccccgggggcgggagggcagctcactcaccgcgccttggcatcctccccgggctccacaaattttctttgttcgctgcagtgccgccctacaccgtggtctatttcccagttcgaggtaggagcatgtgtctggcagggaagggaggcaggggctggggctgcagcacccacagcccccacccggagagatccgaacccccttatccctcgtcgtgtgcttttacccccggcctccttcctgttccccgcctctcccgccatgcctgctccccgccccagtgttgtgtgaaatcttcggaggaacctgtttccctgttccctccctgcactcctgacccctccccgggttgctgcgaggcggagtcggcccggtccccacatctcgtacttctccctccccgcaggccgctgcgcggccctgcgcatgctgctggcagatcagggccagagctggaaggaggaggtggtgaccgtggagacgtggcaggagggctcactcaaagcctcctgcgtaagtgaccatgcccgggcaaggggagggggtgctgggccttagggggctgtgactaggatcgggggacgccccaagctcagtgcccctccctgagccatgcctcccccaacagctatacgggcagctccccaagttccaggacggagacctcaccctgtaccagtccaataccatcctgcgtcacctgggccgcacccttggtgagtcttgaacctccaagtccagggcaggcatgggcaagcctctgcccccggagcccttttgtttaaatcagctgccccgcagccctctggagtggaggaaactgagacccactgaggttacgtagtttgcccaaggtcaagcctgggtgcctgcaatccttgccctgtgccaggctgcctcccaggtgtcaggtgagctctgagcacctgctgtgtggcagtctctcatccttccacgcacatcctcttcccctcctcccaggctggggctcacagacagccccctggttggcccatccccagtgactgtgttgatcaggcgcccagtcacgcggcctgctcccctccacccaaccccagggctctatgggaaggaccagcaggaggcagccctggtggacatggtgaatgacggcgtggaggacctccgctgcaaatacatctccctcatctacaccaactatgtgagcatctgcaccagggttgggcactgggggctgaacaaagaaaggggcttcttgtgccctcaccccccttacccctcaggtggcttgggctgaccccttcttgggtcagggtgcaggggctgggtcagctctgggccaggggggcctgggacaagacacaacctgcacccttattgcctgggacatcaaccacccaagtaacgggtcatgggggcgagtgcaaggacagagacctccagcaactggtggtttctgctctcctggggtggccagaggtggaggaggatttgtgccagtttctggatggagccgctggcgcttttagctgaggaaaatatgagacacagagcactttgggtaccagggaccagttcagcagaggcagcgtgtgtggcgtgtgtgtgcgtgtgtgtgcgtgtgtgtgtgtacgcttgcatttgtgtcgggtgggtaaggagatagagatggggcggcagtaggcccaggtcccgaaggccttgaacccactggtttggagtctcctaagggcaatgggggccattgagaagtctgaacagggctgtgtctgaatgtgaggtctagaaggatcctccagagaagccagctctaaagcttttgcaatcatctggtgagagaacccagcaaggatggacaggcagaatggaatagagatgagttggcagctgaagtggacaggatttggtactagcctggttgtggggagcaagcagaggagaatctgggactctggtgtctggcctggggcagacgggggtgtctcaggggctgggagggatgagagtaggatgatacatggtgtgtgctggcaggaggcgggcaaggatgactatgtgaaggcactgcccgggcaactgaagccttttgagaccctgctgtcccagaaccagggaggcaagaccttcattgtgggagaccaggtgagcatctggccccatgctgttccttcctcgccaccctctgcttccagatggacacaggtgtgagccatttgtttagcaaagcagagcagacctaggggatgggcttaggccctctgcccccaattcctctccagcctgctcccgctggctgagtccctagcccccctgccctgcagatctccttcgctgactacaacctgctggacttgctgctgatccatgaggtcctagcccctggctgcctggatgcgttccccctgctctcagcatatgtggggcgcctcagtgcccggcccaagctcaaggccttcctggcctcccctgagtacgtgaacctccccatcaatggcaacgggaaacagtgagggttggggggactctgagcgggaggcagagtttgccttcctttctccaggaccaataaaagggctaagagagctactatgagcactgtgtttcctgggacggggcttaggggttctcagcctc

SEQ ID NO: 318 - DNA, 2189 bp, Homo sapiens
  misc_feature (279)..(2186): Each "n" represents a nucleotide selected from a, t, g or c, or contains no nucleotide.
caacatgagattgggtaggacacaaatccaaccgtatcattatgttgcacttctttttagaaacaagtgatcccactaacaatttggtttggaagtcaagaataacagcgccatacatatatcaagagcttaggaaaagttttattattgatatattctcaaggtttttttgggaggacagaaaatgcctcctaagctggtctaaaagttatttaagagggcaagtgttctgggctgaattgtgtacttccctcttctcccagccaaatatatacattngaactcttaacccccagtatgtcangaatgtggctatatttggagatagagtctttaggganggtaattccnagttaaattaggntcattgagggtgggccttaantccaacacgactggtgttctcataagaagaggcaatttagatatggaaaggtacacaggaggatcatgtaaagacacagggagaagatggtcccacagtggctccacaagaaaccaactttgctgacttgtggcctnccagaattgtgaggcaaacaaatttccatttaagccaaccaatctgtggtagttttgttcctggaccaaactgagggtcaggctgctatttcttgctgccaataatgagatgtcgatgaactggggatngaagaaagtttttatttctgtaaccagttacaggcagaaggcctggaaattatcaccagaccaactcaaaattacaaagtttttcagagtttatataccttataagctctatgtctacatgtaagtgtacattcctctgaagatataaatgnttctttatcagcatttggaacatgccaggcaaatagtaacactcaatatcatctaccatcagcctcagcctggggcctcacacccatcttcttttatctaaaattctgaattagctatgaatattctcattttacgaatgaggaaagaaatgtgatctgagctaatgccttgtgtcaacaggtatattacactaagatggagaatgatatactgaatctgtgtttgcctttaacgtgtgtttaacttcgagaaaaaagccaagggtggggcggtttgccagtcaacggtggcattccggcgaacagggggcggtgtttcctgcgaaaagtcaaaaacgccggaagctgcccttagtgtttttcagcctacttggtgttagggaaagtgaggccgtgttttacatcccacatattattattctgataatatgtgacttggcgccacgcgcacctctgcacttaaacacgcacttaagggataaacatatacgactgaaaaagagcttcgcccttggtaggcagtgtatggggtgcgcagctgcaatctgcaaacccttgcagggcgcggggtttcgtacacccgctcaaggacgcaaagaacctccattctctgccatacaaagcactcctggcccagagagcaggaaagagcatcagctaggcccagctaggcggcgccctcggccggactctgaaggtcagggccgctgggcgtccacgccgcgtgggtcccagtccccgtcccatcccccggcggcctaggcagcgtttccagccccgagaactttgttctttttgtcccgccccctgcgcccaaccgcctgcgccgccttccggcccgagttctggagactcaacatgaagctaccggccagggttttctttactctggggtcccggctgccctgtggcctcgctcctcggagggtatgctgccgggggcccggggaccgagtaccggcgtctcgacccgcggaaagataagactggcgtcacgggggctcagggagcgaagacgtagctccctggggcgcaaagagagaagaccgggcgtcccgggggttccgggaacaaagaactggcatcccgatgcgctcagagagaaaggacaggctttccgggcctccgggaacgaagataggtgtcccggggctcaaaaaaacatgactgggctttctggaacgctattacacacgcaactccctgtggagtcaaaaaataggactcgacgtctccgggcgcaagagatagggcatgatgtcttggggctctcacagaagacccgcgtcctggggctcacggaactaagaaatcgccttttcggggcgcacaaagaaaagaacancntttccccgaaccaanggccncncccgganttatcancgg

SEQ ID NO: 319 - DNA, 5121 bp, Homo sapiens
gcgaggaggaaacggtgccggagcgcgcagggcttgctgccgccaccgccgctgcacaggctgccggagcgagcctgccgcgcgccgccctccccgctctccttcctgggcgagctgcggggatggggcggccgcgggagcccgagcgcgcgcaggaaccgccgccgccgccgcccgcgtctccgttgccgcgcgcctgagccgccgtcgccgccgcgcgccctgcccgggggcggcccccccagccccatggaggtctcccggaggaaggcgccgccgcgccccccgcgccccgcagcgccactgcccctgctcgcctatctgctggcactggcggctcccggccggggcgcggacgagcccgtgtggcggtcggagcaagccatcggagccatcgcggcgagccaggaggacggcgtgtttgtggcgagcggcagctgcctggaccagctggactacagcctggagcacagcctctcgcgcctgtaccgggaccaagcgggcaactgcacagagccggtctcgctggcgccccccgcgcggccccggcccgggagcagcttcagcaagctgctgctgccctaccgcgagggggcggccggcctcggggggctgctgctcaccggctggaccttcgaccggggcgcctgcgaggtgcggcccctgggcaacctgagccgcaactccctgcgcaacggcaccgaggtggtgtcgtgccacccgcagggctcgacggccggcgtggtgtaccgcgcgggccggaacaaccgctggtacctggcggtggccgccacctacgtgctgcctgagccggagacggcgagccgctgcaaccccgcggcatccgaccacgacacggccatcgcgctcaaggacacggaggggcgcagcctggccacgcaggagctggggcgcctcaagctgtgcgagggcgcgggcagcctgcacttcgtggacgcctttctctggaacggcagcatctacttcccctactacccctacaactatacgagcggcgctgccaccggctggcccagcatggcgcgcatcgcgcagagcaccgaggtgctgttccagggccaggcatccctcgactgcggccacggccaccccgacggccgccgcctgctcctctcctccagcctagtggaggccctggacgtctgggcgggagtgttcagcgcggccgctggagagggccaggagcggcgctcccccaccaccacggcgctctgcctcttcagaatgagtgagatccaggcgcgcgccaagagggtcagctgggacttcaagacggccgagagccactgcaaagaaggggatcaacctgaaagagtccaaccaatcgcatcatctaccttgatccattccgacctgacatccgtttatggcaccgtggtaatgaacaggactgttttattcttggggactggagatggccagttacttaaggttattcttggtgagaatttgacttcaaattgtccagaggttatctatgaaattaaagaagagacacctgttttctacaaactcgttcctgatcctgtgaagaatatctacatttatctaacagctgggaaagaggtgaggagaattcgtgttgcaaactgcaataaacataaatcctgttcggagtgtttaacagccacagaccctcactgcggttggtgccattcgctacaaaggtgcacttttcaaggagattgtgtacattcagagaacttagaaaactggctggatatttcgtctggagcaaaaaagtgccctaaaattcagataattcgaagcagtaaagaaaagactacagtgactatggtgggaagcttctctccaagacactcaaagtgcatggtgaagaatgtggactctagcagggagctctgccagaataaaagtcagcccaaccggacctgcacctgtagcatcccaaccagagcaacctacaaagatgtttcagttgtcaacgtgatgttctccttcggttcttggaatttatcagacagattcaactttaccaactgctcatcattaaaagaatgcccagcatgcgtagaaactggctgcgcgtggtgtaaaagtgcaagaaggtgtatccaccccttcacagcttgcgacccttctgattatgagagaaaccaggaacagtgtccagtggctgtcgagaagacatcaggaggaggaagacccaaggagaacaaggggaacagaaccaaccaggctttacaggtcttctacattaagtccattgagccacagaaagtatcgacattagggaaaagcaacgtgatagtaacgggagcaaactttacccgggcatcgaacatcacaatgatcctgaaaggaaccagtacctgtgataaggatgtgatacaggttagccatgtgctaaatgacacccacatgaaattctctcttccatcaagccggaaagaaatgaaggatgtgtgtatccagtttgatggtgggaactgctcttctgtgggatccttatcctacattgctctgccacattgttcccttatatttcctgctaccacctggatcagtggtggtcaaaatataaccatgatgggcagaaattttgatgtaattgacaacttaatcatttcacatgaattaaaaggaaacataaatgtctctgaatattgtgtggcgacttactgcgggtttttagcccccagtttaaagagttcaaaagtgcgcacgaatgtcactgtgaagctgagagtacaagacacctacttggattgtggaaccctgcagtatcgggaggaccccagattcacggggtatcgggtggaatccgaggtggacacagaactggaagtgaaaattcaaaaagaaaatgacaacttcaatatttccaaaaaagacattgaaattactctcttccatggggaaaatgggcaattaaattgcagttttgaaaatattactagaaatcaagatcttaccaccatcctttgcaaaattaaaggcatcaagactgcaagcaccattgccaactcttctaagaaagttcgggtcaagctgggaaacctggagctctacgtcgagcaggagtcagttccttccacatggtattttctgattgtgctccctgtcttgctagtgattgtcatttttgcggccgtgggggtgaccaggcacaaatcgaaggagctgagtcgcaaacagagtcaacaactagaattgctggaaagcgagctccggaaagagatacgtgacggctttgctgagctgcagatggataaattggatgtggttgatagttttggaactgttcccttccttgactacaaacattttgctctgagaactttcttccctgagtcaggtggcttcacccacatcttcactgaagatatgcataacagagacgccaacgacaagaatgaaagtctcacagctttggatgccctaatctgtaataaaagctttcttgttactgtcatccacacccttgaaaagcagaagaacttttctgtgaaggacaggtgtctgtttgcctccttcctaaccattgcactgcaaaccaagctggtctacctgaccagcatcctagaggtgctgaccagggacttgatggaacagtgtagtaacatgcagccgaaactcatgctgagacgcacggagtccgtcgtcgaaaaactcctcacaaactggatgtccgtctgcctttctggatttctccgggagactgtcggagagcccttctatttgctggtgacgactctgaaccagaaaattaacaagggtcccgtggatgtaatcacttgcaaagccctgtacacacttaatgaagactggctgttgtggcaggttccggaattcagtactgtggcattaaacgtcgtctttgaaaaaatcccggaaaacgagagtgcagatgtctgtcggaatatttcagtcaatgttctcgactgtgacaccattggccaagccaaagaaaagattttccaagcattcttaagcaaaaatggctctccttatggacttcagcttaatgaaattggtcttgagcttcaaatgggcacacgacagaaagaacttctggacatcgacagttcctccgtgattcttgaagatggaatcaccaagctaaacaccattggccactatgagatatcaaatggatccactataaaagtctttaagaagatagcaaattttacttcagatgtggagtactcggatgaccactgccatttgattttaccagattcggaagcattccaagatgtgcaaggaaagagacatcgagggaagcacaagttcaaagtaaaagaaatgtatctgacaaagctgctgtcgaccaaggtggcaattcattctgtgcttgaaaaactttttagaagcatttggagtttacccaacagcagagctccatttgctataaaatacttttttgactttttggacgcccaggctgaaaacaaaaaaatcacagatcctgacgtcgtacatatttggaaaacaaacagccttcctcttcgcttctgggtaaacatcctgaagaaccctcagtttgtctttgacattaagaagacaccacatatagacggctgtttgtcagtgattgcccaggcattcatggatgcattttctctcacagagcagcaactagggaaggaagcaccaactaataagcttctctatgccaaggatatcccaacctacaaagaagaagtaaaatcttattacaaagcaatcagggatttgcctccattgtcatcctcagaaatggaagaatttttaactcaggaatctaagaaacatgaaaatgaatttaatgaagaagtggccttgacagaaatttacaaatacatcgtaaaatattttgatgagattctaaataaactagaaagagaacgagggctggaagaagctcagaaacaactcttgcatgtaaaagtcttatttgatgaaaagaagaaatgcaagtggatgtaagcactctggggcctggcttaatctggcaaagttcttcagacgacttgggagcaaaatggctgcttgagctactctgtgtcgttaatttgttgtttgcacataggttccactttgggcactgtctttttaagagaccaaggcacatgcacagcttttagaaagcaa

SEQ ID NO: 320 - DNA, 6510 bp, Homo sapiens
gtggaattacaggcatgagccacaaatccggttgtcagggcttaaagaaaccaccaaaggacagtgcagtgtcccagcactgatgacatctgggagccattagactcctaggcttcaaggggtagaggggagggagtgcttacgaaaaattgagagggtaactttatgaagagggccacctgccaaaagtgtgccttgatggagggatttgtatcgcccatgaaaggtagcaggaaggggccaaggggagagtaccctgacgccactctcctccagcctcctggtctcctgcggctgcctgtcattgaacaaaccagcacgaagccagagagcaaggaaggcttctgatgctgtcttcatgggtcagcttcggagagcacagggcgggtggtgaatgatggagggtagatctgggggtgcagagagaggacacatactgaacacctgggcttggaccacagtgacctgggactacttctatttccttacccaaccccattaccttatcctttggtaggacataatcaaaaactgctatgtattcttcagagaattactgtgactggctataatgtgggtttgattactgacattacatggcttccaagtttttaaaataatctaatttttgtgtagtggcaaacattaggttctagggcgtacctctggaacttagcagctgggatggtgtagagcaagtaagtttttcacagggataaaggggtcagtcacctaaccctcctaggaaatatcaattgtgaaagcaccagatactgaagcagtatataaatattaaattataatattttgcataccatatagcttcaagttgccctgaaatgaatggtctacatttatgttctggttgcacagcgtgagtgtatctctatccacgtggggcaggcaggagtccagatcggcaatgcctgctgggaactgtactgcctggaacatggaattcagcccgatggtcagatgccaagtgataaaaccattggtggtggggacgactccttcaacacgttcttcagtgagactggagctggcaagcacgtgcccagagcagtgtttgtggacctggagcccactgtggtcggtaggtgctcgggtcctggatggcagctttcttaggagggtgggagagcatcgtcggtaaggccccatgtgggctcctttgaatcctcctgcagaaggtatgagatagacaagcatattcccatggtgttaacagaaactgaaaggttcgtgattaaagtgtctgtgagattcggctcctaagttaggaaaacctggcctacagggaaaagctgctttgccaacagtaagatgggctgtggaggagattccgtcgtgggctgccctcagcctgttcaggtggcctgcctgcagggcacaatggcattggtttcctcctgaatgctgtgtactcttatgctggtgcaagagtcttgacctgcatcttaggcatagaaggttaagtacagaacagtcatttgcttcctccagattagaagcccaggatagtttccaaggagagctgcaaagagacagcccctttcagtggccccacatgagatgacagtgtcacctgaaagcctgtggggcccaggccacacagggtgccctgatgggactgccctgcagaagtcacactgacctggtgacttctcagtttgtaagcatttttaacttacagccttcgatgtagctacatgtaggaaagaattatgtacctgtagaattacctgtgtgggggtgctggagcttatttcccttcactgggagctggtcgtgctgacatttatattgtaagctgagtttcacttcctagagtcataaatcacagtttggttatcacacatttgcactttggttatcacacagagacatttcctaccagacactgccactgttgccctacaacatgtaggtcatgtactttgaacagcatgtactttgtagaagtgaacagtcctggaatgtgtccatcttggtgaggataggccttaaagattcacagtacatacggtctcttttgtagatgaagtgcgcacaggaacctataggcagctcttccacccagagcagctgatcaccgggaaggaagatgcggccaataattacgccagaggccattacaccatcggcaaggagatcgtcgacctggtcctggaccggatccgcaaactggtaagaagagaaggctcatgtgaccattttcctgcacaggagggtagatcttagattgtgaaggggaggtcattttttccaaacctagaccagtgcgttggctgggtctggtggctcacgcctgtaatcccaacactttgggagcccaaggtgggcagtcacctggatcaagagtttgagaccagcctggcccaccgtggttgaaaccctttcctttactaaaaaatacacacattagtcaggcgtggtgtgcctgcctgtagtcccacctactcaggaagctgaggcaggagaatggcttgagcccgggaggcagaggttgcactgagcagagttcattgccactgccctccggcctgggcaacagagtgagattctatctaaaaaaaaaaaaaaaaaaaaacaaacttagaacagcatcttgagtcctattgcgtctgcaatggtcttagtctgaagtatgcatggtgatttgtctgtagatctttgtctgcttttctttgcttcagagtgtactgcgtgtttattatggatgattggaatccatatcaagtcttcagaggcaggcagaagtggccctggcttggtggaggttggtggtgtggcttccacgggcattgattcatgttgtctggtttccctcaggcggatctgtgcacgggactgcagggcttcctcatcttccacagttttgggggtggcactggctctgggttcgcatctctgctcatggagcggctctcagtggattacggcaagaagtccaagctagaatttgccatttacccagccccccaggtctccacggccgtggtggagccctacaactccatcctgaccacccacacaacgctggaacattctgactgtgccttcatggtcgacaatgaagccatctatgacatatgtcggcgcaacctggacatcgagcgtcccacgtacaccaacctcaatcgcctgattgggcagatcgtgtcctccatcacggcctccctgcgatttgacggggccctgaatgtggacttgacggaattccagaccaacctagtgccgtacccccgcatccacttccccctggccacctacgccccggtcatctcagccgagaaggcctaccacgagcagctgtccgtggctgagatcaccaatgcctgcttcgagccagccaatcagatggtcaagtgtgaccctcgccacggcaagtacatggcctgctgcatgttgtacaggggggatgtggtcccgaaagatgtcaacgcggccatcgccaccatcaagaccaagcgcaccatccagtttgtagattggtgcccaactggatttaaggtatgactgggtaatgtggagtccttgtacctttcagcaagcaacagacacacagagtaatgctgcccctgaaggcccacatcctttgaggatacttacccctatttccatgggctaggcatgtgggcatcaattagtgaaccagagtgatcattaattcagtgatgtcttttttttttttttttttttttttttttttgggggaggaagagtctagattggtcgcccaggctggagtaaagtggtgtgatctcagctcactgcaatctccatcagcctcccaagtagctggaattacaggcacccaccaccacacccagttaatttttatatttttagtagaaacagggttatgccatgttggccaggctggtcttgaactcctgacctcaggtgagccacccaccttggccacccaaagtgctggggttagaggcgtgagccactgtgcctggcccagtgatgtcttttgaactctttctaagtcattacactatgtatctgtgatgagctttacttacttactttgttgttgagaaggctggagtgcagtggtgtgatctcggttcactgcaacctctgcttcccaggctcaagtgattctctcacctcagcctcctgagtagctgggaccacagacatgcaccactacacccagctaatttttgtgtatttagtaaagggatttcaccatgttggccaagctggtctcaaattcctggtcttaagtgatctgcttgtcttagcctcccaaaatgttgggattacgggcatgagccactgtgctcaaccctatttatttacttttttgagacagaatcccacctgtcacccaggctggatgcatgtggtgacacagctctccactaaaaatacaaaaattggatgggcatggtggcccatgcctataatccagcactttgggaggccaaggcaggcggatcacctgaagtcaggaatttgacaccagcctgggccaacagggcaaaatcccgtgtctactaaaaatacaaaaattagccgggtatggtggcgggcacctgtaatcccagctaccgaggaggctgaggcaggagaatcactgggacccaggaggtggaggttgcagtgagaagatatcacttccactgcactccagcctgggtgacagcacaagactctgtctcaaaaaaagaaaaaaagacaagatcatacaaattctaggccttacaggttacacgactctgtcacacctaccccactctgctgtcggatagcaaaatcaatctgcaaatgaaggggtgtggtggctgtgttcagacaagatcttacaaaattaggtggctagtccagcagctgtgctaacccctgaaggagaagaagagacacccacagtaggaaatcccagtcagaactgactgcagtggtctcccccaacagagacggtggggtctgagccagaggcagcagggaaagcacagcacaagaacgcacaggcccaacagagaaatgccacaagatagtaaccaactattgataaagctgaaagaggacagcaaggtttcttttgtgtcagtggaaggtggggacagattttgtgtctgaggcaaacccagttgccaaaattactaggcttcccggaaaagaaataaagacgttgctgcttttgttttgttttgttttgttttgtttttgagacggagtcttgctgtgtcgcccaggctggagtgcagtggcgtgatattggctcactgcaagctccgcctcctgggttcatgccattctcccgcctcagcctcccgagtagctgggactacaggcgcccgccaccacacccggctaattttgtttttgtatttttagtagagaccgggtttcaccatgttagctaggatggtctcgatgtcctgacctcgtgatctgtccacctcggcctgccaaagtgctgggattacaggtgtgggtcactgtgcccggccttttaatttttttgagacagggttcttgctctgtcacagtgggtaggatctcagctcattggaacctctgccctccagggctcaagcaatcctcccacctcagcctcctgagtacgctgggaccaagggccacaggtgcatgacaccatgcccagctaatttttttgtatttttggtagagacagggtcttgccatactgcccaggctggtctcaaactcagttcagaaatccacctggcctcccaaagagctgggataatgggtgtgagccactgcacctggtgctgttttcatcacaaacaactcattctttttttaaatcaaaccctacatgagacagtggaacgaatgatgttgtgaagcagtttatagtaatgcccaagttaaaataaaatatatacaccacctacaagattcccccaaatgcccataaaattactaagttcaacctaccttttccacatgaattctcctgttcacctacagggtgtcttctttttggaggaaaagcagccaccatttccaggtttgatataagcttcatggactgtttcttcctccttctccggcaaggtgggcattaactaccagccccccacggtggtccctgggggagacctggccaaggtgcagcgggctgtgtgcatgctgagcaacaccacggccatcgcggaggcctgggctcgcctggaccataagttcgatctcatgtatgccaagcgggcctttgtgcactggtacgtgggagaaggcatggaggagggggagttctctgaggcccgcgaggacctggcagctctggagaaggattatgaagaggtgggcgtggattccgtggaagccgaggctgaagaaggtgaagaatactgaggggagggtgtggtgggttctccactccactgccacccccagcgtggctgctttcacgttctttgcaattaaaggttctgtataaaaccaagacctctgtgtatcgcactgcctagctttgcctgcaggagcaggtggcacccccagagcctgcatggacaagtg

SEQ ID NO: 321 - DNA, 484 bp, Homo sapiens
  misc_feature (2)..(481): Each "n" represents a nucleotide selected from a, t, g or c, or contains no nucleotide.
cntcaggtctaaagtgtttaattatcactcacatatttcacaggaaaaggaatgtagcaaatgggtcaaggtggtataaaaaaaaaatccaggtttgtacatgtctctctgtttacatctgggagaaaggttgtcctggcatcagtcgcagcagctgcacttctctgacgcccctttgcaaacacagccctgggcacacttgctacagcccacgggnagncaggagcagcagctcttcttgcaggaggtgcatttgcntctttgcacttgcagggaaccagcgcaggtgcaggagacacctgggaggaaaggaggaaaaaaaaagccagtgagncggcgagttgacctgcaggagggtacaggcagtgagttnaatgagtctnccttggccccctcctttgtggcggggggccagcccttnaggagtttcntttcccattcagaggnagagggaggnggaggcccttgtncttttnccttnaat

SEQ ID NO: 322 - DNA, 1935 bp, Homo sapiens
tctagacagtggcgcaagagactggggttgcactgggactccaggaaaggcttagctgttgacgaaggaccggggcggggccggggggcggggcgaaggccaggatctccaggtacccggaaccccaaggggcgggtgtagcaggcaatcttggcgaaactgggaagggcgggcaggagggcagggaagccgctcacccaggcacaaagcgcctcccgcttgagcggactccaaagggacggtccgcggtgtgcagcgagctgcgctcaggggaccttgcgcccggcccttctgctgcacacagcccacccaggacctcccgcagcgctgacaggcggggcgggtgcaaagacggggcggggtctctgcgcccggccccctcccctgactatcaaagcagcggccggctgtttgggtccaccacgccttccacctgccccactgcttcttcgcttctctcttggaaagtccagtctctcctcggcttgcaatggaccccaactgctcctgcgccgctggtaaggaacgccgggttccgtgcctggggatgctcgattcccagacaccatagagagtgttcctgggtttgagaaggtcgtattttgagatctcaactgtaggggactccttgacttagtccagtgctttcctcttggccaagatcctgagagcatttccttcctctctgtgcctctgtgtcagcgttgagggtactgaggctcaaggctgtcctgctccacgtcatgcggtttgtcccagggctgttggctgagccccagtgctctgaccaggctttgagcagcaggattagataggaggcaggggacattgcctcttcggggttcaggacagaaagtcgaagtcgccgtcttcccaggctgtgcctggagcctgggactttcctttggagtgcaaacaggaggctgcttggccttcccagcatgaagggagaggacatggggcttctcttcctctgctctgagtgggaaaggagctctgagggctggccccgcacagaggagggggcaatggagactcattaactcactgctgtacctcctgcaggtcactcgccgctcactggcttttttttctctttctcgcaggtgtctcctgcacctgcgctggttcctgcaagtgcaaagagtgcaaatgcacctcctgcaagaagagtgagtgtgaggccatctccatggtctggggctgtggctaaggttgggatggaacccaaggctggccctgagtgcatgcttctggggaactggccttcctttgtccccgtaggttgtcactgcctttctagtcttctgccctgtgcagggcgcctgggcagctttctcataggaagacccaccccagatatttcccagttgtctcctgacaaagccataccctcctgaactgagggtcctttgtggctggaggctctgttgggggcctctgttggggagggaggtccctgggcaagttggctgtgacctctcatgctcctcttcttccccaggctgctgctcctgctgccccgtgggctgtagcaagtgtgcccagggctgtgtttgcaaaggggcgtcagagaagtgcagctgctgcgactgatgccaggacaacctttctcccagatgtaaacagagagacatgtacaaacctggattttttttttataccaccttgacccatttgctacattccttttcctgtgaaatatgtgagtgataattaaacactttagacctgattctgacttcagtttcccttatgtgcttcagaaatcagagactggggtgggggatcgaactagggttgcagactcctgggctctaaatggaaatctgagtccctaacaatcagagtgcattaaggcaagccaggctgcctcactgtgcttcctcttctgtagaatggaataacacttcatcaggtcattggtggggatcc

SEQ ID NO: 323 - DNA, 1140 bp, Homo sapiens
ttccaaatactcaatagctctcgaattctaggaatcttgagaagaggcctggattaaggattcagacgtgggccctcagatgggtgagaaacggggactctgtgtctcctagcggggacagaagggccagctgacaggccaggcagagtggacggcgcttgggcagggggcggcggcaggcagccacacggcgcaggagctgcagagctaaagccaggccatgtggactggctgcgggtttcgctgcctagctggtggcattgagcaagttacttaacctttctgaacttcccgttttatgattttggaggaaacagtcatagctttctctctggcagagtccgatggcccgagtcccgctccacagtgcgggtggagggcacggaggggtgtgtgtggggggcgacagcccaggaagwctagggggcggcagggcgcgtgggggcgggggttgggagaccgcagggaggatccccgaccttgtctgaagatccaagcaggcggagccgcggtctggtccgcggggtaggcggggcgcaagagtgttcccgggggcggggggccgacccgcgtctaaaggtttccgcgattcacccgccggcgcctggcctggcccagttgcaccacgagcgctgcggacactcggggcggcagtcggtctgtcagtcctcccgccaggtcccgcggcccgcacctgccgcccgcacctgcagctccgcacctgcggccagtgcctactgccctctcttgccgcccgcacctgcagccccgcacctgccgcttgcacctgcagccccgcgctctacccggttcaagcatggctgaccaggcgcccttcgacacggacgtcaacaccctgacccgcttcgtcatggaggagggcaggaaggcccgcggcacgggcgagttgacccagctgctcaactcgctctgcacagcagtcaaagccatctcttcggcggtgcgcaaggcgggcatcgcgcacctgtgagtagggccttgggcggtgggccccgtcctgtctgtctgcctggggagcctgcccggcgggctgacgttgggccctctgagcctcctgccgacagactctgtctgtccgactgatgtcttagagcctctctcgctctctgtctggtagcc

SEQ ID NO: 324 - DNA, 2583 bp, Homo sapiens
tggcggcggcggcggcggttgtcccggctgtgccggttggtgtggcccgtcagcccgcgtaccacagcgcccgggccgcgtcgagcccagtacagccaagccgctgcggccgggtccggcgcgggcggcgcgcgcagacggagggcggcggccgcggccagggcggcccgtgggaccgcgggcccccggcgcagcgctgcccggctcccggccctgccggcctcctcccttggcgccgcggccatggcggccagcgcgaagcggaagcaggaggagaagcacctgaagatgctgcgggacatgaccggcctcccgcacaaccgaaagtgcttcgactgcgaccagcgcggccccacctacgttaacatgacggtcggctccttcgtgtgtacctcctgctccggcagcctgcgaggattaaatccaccacacagggtgaaatctatctccatgacaacattcacacaacaggaaattgaattcttacaaaaacatggaaatgaagtctgtaaacagatttggctaggattatttgatgatagatcttcagcaattccagacttcagggatccacaaaaagtgaaagagtttctacaagaaaagtatgaaaagaaaagatggtatgtcccgccagaacaagccaaagtcgtggcatcagttcatgcatctatttcagggtcctctgccagtagcacaagcagcacacctgaggtcaaaccactgaaatctcttttaggggattctgcaccaacactgcacttaaataagggcacacctagtcagtccccagttgtaggtcgttctcaagggcagcagcaggagaagaagcaatttgaccttttaagtgatctcggctcagacatctttgctgctccagctcctcagtcaacagctacagccaattttgctaactttgcacatttcaacagtcatgcagctcagaattctgcaaatgcagattttgcaaactttgatgcatttggacagtctagtggttcgagtaattttggaggtttccccacagcaagtcactctccttttcagccccaaactacaggtggaagtgctgcatcagtaaatgctaattttgctcattttgataacttccccaaatcctccagtgctgattttggaaccttcaatacttcccagagtcatcaaacagcatcagctgttagtaaagtttcaacgaacaaagctggtttacagactgcagacaaatatgcagcacttgctaatttagacaatatcttcagtgccgggcaaggtggtgatcagggaagtggctttgggaccacaggtaaagctcctgttggttctgtggtttcagttcccagtcagtcaagtgcatcttcagacaagtatgcagctctggcagaactagacagcgttttcagttctgcagccacctccagtaatgcgtatacttccacaagtaatgctagcagcaatgtttttggaacagtgccagtggttgcttctgcacagacacagcctgcttcatcaagtgtgcctgctccatttggagctacgccttccacaaatccatttgttgctgctgctggtccttctgtggcatcttctacaaacccatttcagaccaatgccagaggagcaacagcggcaacctttggcactgcatccatgagcatgcccacgggattcggcactcctgctccctacagtcttcccaccagctttagtggcagctttcagcagcctgcctttccagcccaagcagctttccctcaacagacagctttttctcaacagcccaatggtgcaggttttgcagcatttggacaaacaaagccagtagtaaccccttttggtcaagttgcagctgctggagtatctagtaatccttttatgactggtgcaccaacaggacaatttccaacaggaagctcatcaaccaatcctttcttatagccttatatagacaatttactggaacgaacttttatgtggtcacattacatctctccacctcttgcactgttgtcttgtttcactgatcttagctttaaacacaagagaagtctttaaaaagcctgcattgtgtattaaacaccaggtaatatgtgcaaaacagagggctccagtaacaccttctaacctgtgaattggcagaaaagggtagcggtatcatgtatattaaaattggctaatattaagttattgcagataccacattcattatgctgcagtactgtacatatttttcttagaaattagctatttgtgcatatcagtatttgtaactttaacacattgttatgtgagaaatgttactggggaaatagatcagccacttttaaggtgctgtcatatatctttggaatgaatgacctaaaatcattttaaccatgctactggaaagtaacagagtcaaaattggaaggttttattcattcttgaatttttcctttctaaagagctcttctatttatacatgcctaaattcttttaaaatgtagagggatacctgtctgcataataaagctgatcatgttttgctacagtttgcaggtgaaaaaaaataaatattataaaataaaaaaaaaaaaaaaaaaaaaaaaa

SEQ ID NO: 325 - DNA, 3766 bp, Homo sapiens
ggcggtagtgcgtcggctgctgcccgggtctggcagaactcgggtgttttgggctgagacagtggcagctgcggccccgaccccaagtgcggggacctccggcgaataaaggtcggcctgcgggtaggccggtagggcctgcggtccggcctgcgggagaactgggtcgtcagtcctccgagtggtggggctggggactttgagggagttggctctagggcacagtccctgcctggccaggtcggaggaacaagtgctgggatctggcgtgtgtgctccaggggctctttccgcggccctttccacctcttttcactttggggacggtaggcctttataaacggactaatgctgggtgatttgttcctgtggttgttgatgccgaggaaagactctgggccccaggactcacctaaactggagttcgaatactgttcgctcgctgtgtgaccttggaaaaaataacaagcttttctgaagtgagaagctgttctcagccacgagtcctgtgcaagatcactaatgattacctggcatttctgcgacacaggcaggtcctcagggtttgtgcaagtttgcaaacatgttcaccctgtctcagacctcgagagcatggttcatcgatagagcccgtcaggcacgagaagaaaggcttgtgcagaaggaacgggagcgggcagctgttgtgatccaggcccatgtccggagttttctctgtcggagtcgactgcagagagatatcaggagagagattgatgacttttttaaagcagatgaccctgagtccactaaaagaagtgcactttgtattttcaagattgccaggaaactgctgttcctattcagaatcaaagaggataatgagagatttgagaagttgtgtcgcagcatcctgagcagcatggatgctgagaatgagcctaaggtgtggtatgtgtccctggcttgttctaaggacctcaccctcctttggattcaacagatcaagaacattttgtggtactgctgtgattttctcaagcagctcaagcctgaaatcctgcaggactcccgactcatcaccctgtacctcacgatgcttgtcaccttcacagacacttcaacgtggaaaattcttcggggaaaaggtgaaagtcttcgaccagcgatgaaccacatttgtgcaaatataatgggacatctcaaccagcatggattttattctgtgctgcagatattgttaacccgtggcctggcaagaccccgtccttgtctatccaaaggcactttaacagcagctttttctctagcgttacgccctgtgattgctgcacagttctcagacaatctgattcggccgttcctcatccacatcatgtctgtgcctgctctggtgactcatctcagcacagtgacccctgagcgcctcactgttttagaatcccatgacatgcttcgtaaattcatcatatttttaagagaccaagatcgatgccgtgatgtatgtgaaagtttagaaggatgccatacgctttgtctaatgggcaacctcctacacttgggctccctcagccccagagtgttagaggaggagacagatgggttcgtgagtttgctcacccagacgctgtgctactgtcggaagtatgtgtctcagaagaagtccaacctgacccactggcatcctgtccttggctggttctcccaatctgtggattatggccttaacgagtcaatgcacttgatcaccaaacagctgcagttcttgtggggggtgcctctgatccggatcttcttctgtgacatcctgagcaagaagctactggagagccaggagccagcccacgcacagccagcatcccctcagaatgtgctcccagtgaagagtctcctaaagcgtgcttttcaaaagtcggcatcagtccggaatattctcaggcctgtcgggggtaaacgggtcgactctgcagaagtccagaaggtttgcaacatctgtgtcctctaccagacctcgctgacaactctcacacagattcggctgcagatactcacaggtctcacttaccttgatgacctgcttcccaaactgtgggcatttatctgtgagctcgggccccacggagggttaaagctcttcttggaatgcctgaacaatgacactgaagagtccaagcaactcttggccatgctgatgctgttctgtgactgttcgcggcacctcatcacaatccttgatgacattgaagtttatgaagaacagatttcattcaaactggaagagctggtcactatctcctctttcctgaattcttttgtgtttaagatgatctgggatggaattgtagagaacgccaagggtgagaccttggagctgttccagtctgtccacgggtggcttatggtgctgtacgagcgggactgccggcggcgcttcacccccgaggaccactggctgcgaaaggatctcaaacctagcgtgctcttccaagaactcgacagggacagaaaacgggcacagttgatcctgcagtacatcccacatgtcatccctcacaaaaacagagttctactgtttcgaaccatggttaccaaggagaaggagaaactggggctggtggaaaccagctctgcctccccgcatgtcactcacatcaccatccgccggtccaggatgctggagagcttgtttgagtgcccctggccactggtgatcaatgccgagagctgctaggaaggcagtgtgtgctgaacagtggatgtttctgacattcttcaaggacggctacgagcagcttaggcagctctcccagcacgccatgaagggggtcatccgtgtgaagtttgtcaatgacctcggggtggacgaagcagggattgatcaagacggtgtttttaaggagttcttggaagagatcatcaagagagtttttgacccagcactcaatctgttcaagacaaccagtggggatgagaggctgtacccctcacccacatcctacatccatgagaattacctgcagctcttcgagtttgtggggaagatgctggggaaggctgtgtatgagggaattgtggtggacgtgccatttgcatccttcttcctgagccaactgcttgggcaccaccacagcgtcttctatagctcggtggatgaactgccttctctggactccgagttctataaaaacctcacctccatcaagcgctatgatggggacatcactgacctgggcctgacgctgtcttacgacgaggacgtcatgggtcagcttgtttgccatgaactgattcctggagggaagaccattcctgttacaaatgaaaataagcaacagaattagctacatccatctgatggcacattttcgaatgcacactcaaataaaaaaccaaacagctgccctcattagcggattccgttccattatcaaacccgagtggatccgaatgttctcaactcctgaactgcagcgtctcatctctggcgacaatgctgagattgatctggaagatttaaagaagcacacagtctactacggtggtttccatggaagtcacagagtcatcatctggctctgggatattctggcctccgacttcacaccggatgagagagctatgtttctgaagttcgtgaccagctgctccagacccccgctcctgggattcgcctacctcaagcctccattctccatccgctgcgtggaggtgtcggacgatcaggacaccggggacactctgggcagcgtcctccggggcttcttcaccatccgcaagcgggagccag

SEQ ID NO: 326 - DNA, 1829 bp, Homo sapiens
tctagagggctgcagaagttttgccttgattcttcccccaaatatgttttccaagcttttagaattctcttcttcctcaggaacaccaattattcttaggtttggtcatttaacataatcccagacttcttggaggctttgttcatattttcttattcttttttctttgtctttgttgaattgggttaatttgaagaccttgtctttgagctctgattttctttcttctacttgttcaattctattgctgagactttccagagcatttcacatttctaaaagtgtgtccaaagtttcctgaattttcaattattttttctttaagctatttcattgaatatttctcccattcaatattgggggattgtgttgggagaggagggtctccctttcccacttccgcaaatggggcactcacagtatttggagtgtcttctgggtcctgcaggagcagtctggttccttcagagagtctgtgggtccttttgggattgctggttttttcttgcagttgatctggagctaaaattcaccatggaagcctccagatgctgctctgtctgaagctgcaatctagtcctgccacccagccactatgatcccctccatctctctgtctactttagtcagataagctcaaagctagaacaaaggacccatatatgagcctacggatctgccttcaaacacttgagaagccctccaactcaccatgagaacactgaccccaatcgggatctttgctttgctccaacagccagacactcagagaggtcctcagacccagcaactaatggacttggtgggatggttgtcctcaaagcagccagcatttttatcaggctggcgtctggtcctgtatttttctgggatattcagaatctcttgacatgtatcttcacttaattgtgaatttaaaaaattatagatggatgtagatatagatatagatatagacatagagatagatatagatagacattttggagaagagtctctctttgaagacttcctctcagagtacaagtccgtggttacaaccattttgtttctcagcaaacatggggaagtttgcttttcttctctgaggaagttaatataaatgtttattgacagtgcagtcatcaaggaataaagttgctgattcattcctttacactgaaaccctttgttgtgccctcctcttccttcctctttatagggagacactctgagaaagagcacattgtgggggcccactccatgtgatgtttgcttggttgcctgttcccttttctacctgcagagcacggttcccataagggcggcgagatcagcctcctgtctcatctggaagaccaccactctggggtctcagaggaatgatggaagccttggggtttctaaaattggaagtgaatggccccatggtgacggtggccctgtcagtggctctcttggccctcctgaaatggtaagtgcagccagccctagggactgtgacagcgtcagccgtctcaccctggagccttgctggtgccatggcggggtatgtgggagtgtgtttttcttcttttctaatctagcgggagtgagtattaacacagcttcagaattaaaagcaaacagccaggttaatcttttgctaaaatgcatgagattgaagtgtcaggaaaggctggtgattcagtgactgagaacgctacacataattaagtttgaaagagatggaaaaagaaacaaattggaaaggcattaggtttgggtagaagcatttccttgaaccccgtcatatctcctcacctcatttttctaaaatcctctgtccttgttggatttacagtgaattc

SEQ ID NO: 327 - DNA, 2431 bp, Homo sapiens
tatgatcttattttattggctcatgcagtccatttgactcatatttcctcctctcctgccagtcatcaggcccaagttcgtggggacaccagaagtcaaccagaccaccttataccagcgttatgagatcaagatgaccaaggtatcccctgcccccgcctctttcccagcattttctaacatcttcttcctggtcaaaacagaaacttctggccactggttggtgcgagaaagttggctgtgatcttgggatgctatatgacttcagggaagaacctggagtgggaggattatgtcagtaaagagacacttcccctcatccatcaacagatgtataaagggttccaagccttaggggatgccgctgacatccggttcgtctacacccccgccatggagagtgtctgcggatacttccacaggtcccacaaccgcagcgaggagtttctcattgctggtgaggcaccgtcccgcgccctgtgccacaccaacagtccctgggcgcggcctagcaaccacgaggggcgaggctctgatgggaatggtccactggaaatgggaccaccccaatttcagtctatcagaaggccgggcgtttgccagcttggcagctcagccaatcacaagctgcttgtcggtccccgccccgcctttctccttaggaaaactgcaggatggactcttgcacatcactacctgcagtttcgtggctccctggaacagcctgagcttagctcagcgccggggcttcaccaagacctacactgttggctgtgaggaatgcacagtgagtgcctggaccctgacctccaacgggagatccttcccggggccattccctaaatcgtgggcttgtttcttgctccctctggctattctgtgtccctgtggctgctccccaaccctaaggctgtccctgatctctcttgctattcccaagccgagactgctcccttacaaattctggctgctccctttccctgtgtccaataccgtgtgatcgcctgtccctccctggtccctctaattctcccttgtgactattctgtaatcccactcccgttcctgagccccgggattgttttcttggttccccagaatgttctccaagaacccaaagtgctgttccctaatcccactgacccttcctcagcacatctgcttgttgctctgcagctctgactattccagacaccagaggtgttacactgacctcctggctagtccaagcctgttccctgatggctcctgatggcctctgagcccagtgactatcttgaagccccactggctattcctgtgcttaaactccttagccgccaaccggggtggggcccttactactgccagtttttccctgtcctttggacaattccacaggcgacctgcctgactgaccccaggcctattccccagccaccattccaggacactgatttactggcttactgttacctttcaggacccagtgacatttccctcaatgggaggggctgtcctgggctatgtacttaggtggggtgagagcaagtctccccagcgcggctcagtgttgaaagctgaggagaggaagttctgctccacgggggaggcagggagaagccctcagagatgtttccctcctcccttccaggtgtttccctgtttatccatcccctgcaaactgcagagtggcactcattgcttgtggacggaccagctcctccaaggctctgaaaagggcttccagtcccgtcaccttgcctgcctgcctcgggagccagggctgtgcacctggcagtccctgcggtcccagatagcctgaatcctgcccggagtggaactgaagcctgcacagtgtccaccctgttcccactcccatctttcttccggacaatgaaataaagagttaccacccagcagacactgtttctgtgtactgcctgggaacaaacccatgttgctgatgacctggtgtgagcacctgggaccagtgggatgaggatgccaatgttggttatatttacttaatctgatgtactggtagtaattcctcaacattgggattagcactgatgatctgcaacagcagcaatggtcactgaacctgcattatcaaccgtaacctctgaataatttctccagccaatactttaaacattttcctatactgattcctaattgctatttgcccagggctttctagttataaattatcccacagctgacaaatcactgcctgactggaaattccccattcacaatcttgccagctgacagagtcattgacaaatgccctaccaattggcaaatgactatcattgcctcaagcacagtcctgatgttgtccagtgagatgcccatccaaacacatgggtgttactgtcctcatcctcaggtttgtaccatgagtctgacttgagtgaagggacccaggcacccagagtcccac

SEQ ID NO: 328 - DNA, 2057 bp, Homo sapiens
ggagttattgcttggtgggtatagagtttcagttggggaagatgaaaagttctggagatggatggtggtgatggctgcacaacaatgtaaatgtacttaatgccactgaacagtacacctaaaaatggttgaaatggtaaacactttatgttctataatattcatggcatccaaaataactgagtcactgtagaaatgataatgtgcccttttcagtgtgatatcgtttcagtattttttaattcttttttttttttttttttaaagggagtctcgctctgttgcccaggctggagtacagtggcacaatctcagctcactgaaaatgaaaagcattttcattttccacctcccaaatagctgggattataggcttgcaaccaggcccagctaacttttgtatttttagtggtgacagggtttcaacaggttggccaggctggtctcgaactcctgacctcagtgatccaccccccccctcagcttcccaaagtgctgagattacaggcatgagccactgcacctggccaactttttcaatttgttctcaaatactctgcacataataaaaggaatataggaaacagggaggaggagggaaatggaatcctaattaggctgtcaatattggtaatttttcctaatagtttcctatatgttttatttatgtatttatttttccattcttcctttgtgtattcttttctttgcacttttttttcctggagtaatttaaagtaaatgccagatatcatatcattttgcttataaatacttccttcagaagacatctctaatagatatatatctggttaggaggttgtcaagggaaaatagaaaagtattctatcagtaaatacatatagacatacttatgggtctctcatgtaagcgtctttgtgacatgagtcaatcatggattttactgaaatacattatttgatgggtaattcaactgtgctgaatattagtactatactaataattattatttattggcttcttattatgctccaagtacaaagcttgtcatttttaaccagcgtgtcatttgaattcctatagcaacgtgacatttttcacaaacctagtgtaaaaaagcttattatttttacccagcatgtcatttgaattcctataacaatgttatcaggtagacattatccctaatttccagacatgtcatttgaattcctataacaatgttatcaggtagacattatccctaatttccagacaaagacatagattcaaagtattaagatttcccaagattgtagactaaaggaaagtactgaaactagctctttctgcattcaaagtgctctctgctgctacgttacactggcactgcatgaactagtagccccagataaattctaaaatcacccaggacacaccatcgctggaaatgggagccatatgtgattcaccccaaaattcttagatccattgccagataaaacagtgaaaatcaaaagagaatatatctgattcgtaaaagacaccatatagaaacagtctgctaatgaaattagcaaacaaacattggaatcaaatattttggcccataattctggcacattttttacaaatgtagtgtgacttactctctttgaatttcagtttctgtctctgaagagtgggtacaatatctctcctctgatgctcatgaaaaatagttttccctttcataaattacttagcgaaatatcctgaaacaccttcagaatcaccactttctccacctgcaatacacataactcaagaatttgcgtcagcgaacttcccaatatgaagcaaagcctctccttcctcctaccaatgattgagtcattcttctattagataacagtagctatttaaatacttctgcagaagctcacatatttttagtttgttgaagttcgtgactgcttcactctctcattcttagcttgaatttggaaatgacttttgatgacctaaagatccagactgtgaaggaccagcctgatgagaagtcaaatggaaaaaaagctaaaggtactagggatgggaaaatgtgtacagggaaa

SEQ ID NO: 329 - DNA, 6462 bp, Homo sapiens
  misc_feature (4396)..(5998): Each "n" represents a nucleotide selected from a, t, g or c, or contains no nucleotide.
cacccccacgagcaggaacatactgagcaccgcacactcacttcaccctggttcaacacccccacgaggttgaccccgtcattatgttagagattatgcattttccacatagggaaactgaggctcaggggtgttaagtgactcacccaaggtcacacggctaggaagttgctgcacgctcctatgctccatttcctctgggtgagaatttgtcctaggagcttctattgaacactgtgaggttgctgggaggagcgcgaggtgctggggatatagtaacaaacagaacaagaccaagagtaagacaggaaatggggaggggagagtagagaaggaggcagaggggacagggtggggtcaaagcaggatgccctcccagttcctcctgcctctaggttcctctttccctgctgattccaggagcctatcaacccagataaagcgggacctcctctctggtagaggtgcagggggcagtactcaacatgatcacagagggagcgcaggcccctcgattgttgctgccgccgctgctcctgctgctcaccctgccagccacaggtgagggggtgagggcccagctggccccaggggtgtccaggcccaccacatccctgaccgagccccacccacccatcccctggccctgttacaggctcagaccccgtgctctgcttcacccagtatgaagaatcctccggcaagtgcaagggcctcctggggggtggtgtcagcgtggaagactgctgtctcaacactgcctttgcctaccagaaacgtagtggtgggctctgtcagccttgcaggttagggggagcctggggtgggggatgggggggagggaaggactgtctgtgggggtcacccaaaactgggcactttctttctctgggacttccaagggtggccctgaggccctgatcgtgaccatacctcagggtttctcaaccttgttactattgacatttggggctggaaattcttggctgggggaggggattgcttacctgtgtattgtgggatgttttgtaacacccctagccttccactagatgccagtagcaattctccccaccagctgtgacaaccaaacatgtcagcagacattgccaaatgtcccctgggggtcaaaatcacccctgattgagaaccactgacatagctcacacatattgagcacctcctgcacactggaagcattgcaggtggggtgcagcttggtatttccctaattttgatgacagctcatgtttattgagtgcttactgtatatggacacactgtgggggcgggaaagtttggggaattcaaagggcagctctaggcccctaattatgatgacacttcacattcattgagcactccctgtataccagctgcatggcagggttgggagatgagcttgaggatttctgagggtagctctagtctcctgatcatgatttccagcttgcatggattgagcccttaccgtatgccagacctgttttctacttgtttactatatatcccagatacaccgtgggcatggggagcttggggatttttgagggcagctctgggccccaagtcatgtcaacagttcatcacatctatttggcatgaacagcatacctagggctatgcagtgggttggggatagatctggggttatttctgaggaggcctctgaggtcatagggatgatggctcaggtttattaagcactttctatttacctactaccgtgtagtgtggtgatctggtgggtttctgacagcagcccttggtttctagtccttacctttgcttactgcggacctggtgttggccttgccagccttccaatggtaactccagatgcctgattgtgaaggtaaatgacattatcaagcacttattgtatatccactgcttcccatcagtatcccaatatccctaaaaggtaaggacttatcaatccatcgcacacgcacttgcctagcaacccttcgtgtctgcccacactctggagtcccacatgccattcttgttagctcatgccaggatgggatgtgtgtgctcttctccacaggtccccacgatggtccctgtggtccacatgggccccctgttcggtgacgtgctctgagggctcccagctgcggtaccggcgctgtgtgggctggaatgggcagtgctctggaaaggtggcacctgggaccctggagtggcagctccaggcctgtgaggaccagcagtgctgtcctggtgaggaggatgagcaaggcgggcaagcactccctgtcacccagcactggtgggaacgatcggtacagaggtcctcagagtgggcccgtccccagtgtttgtaaggacctaaggaggagagtggtgggaggtgaggtcagagaggtgaggagggtccattgcctgggggccacagagaggacgttggcttttcatctgagtaatttggactgtgggcagaggaggaacgtgatctgactggggttgggaggagaacagactgtgcacggtgagggtgagaggggaagcggaggcacccatgtgaaggttgctgcggcaggcccggtgagcggggatggtgggcccagaatggtggcagaggatataaggacaggattagctcatgtggggcactcaaggaagcaaagagccctgaatgacaccccacctccatcccattaccctctcttctctcccacagagatgggcggctggtctggctgggggccctgggagccttgctctgtcacctgctccaaagggacccggacccgcaggtgagcctgtaatcaccctgctcccaagtgtgggggccactgcccaggacaggcacaggaatcagaggcctgtgacacccagcaggtctgccccagtgagtgagggaagccacaggatgctgatgggtgcacccagcgtgggtctgcggggttacagcagggaactgccaggctgagaggactttagcatgcatgaccacacctgcatccctccacctcccaccccaccacagcacacggggcctgggccacctggggcccctggaccccctgctcagcctcctgccacggtggaccccacgaacctaaggagacacgaagccgcaagtgttctgcacctgagccctcccagaaacctcctgggaagccctgcccggggctagcctacgagcagcggaggtgcaccggcctgccaccctgcccaggtacaccaggatgaggctgctgatgttgctggtggggctcttgattgagggcatagatgctctgccatttctagagttcctaggccatgtgaccatgcagcccttcatttggggacagtctgcttcaagggtctaggggctgagaggaaggattgaggaggcctttctcctcactccctttcctcctccaacagtggctgggggctgggggccttggggccctgtgagcccctgccctgtgacctgtggcctgggccagaccatggaacaacggacgtgcaatcaccctgtgccccagcatgggggccccttctgtgctggcgatgccacccggacccacatctgcaacacagctgtgccctgccctggtcagcatctcagggttcacgatttgcatgcctaagtcccccttgcccttctctgctgcccagctcctgctgctgaggccttgttcctgtctctgattcctcctttcctggccctgataccttgtttccacccctggtcccccattcacacatctgatcacctctactccctcctaccgccctcattccttcctctgaacccccttgctgattccctgctttggtccaatcccctgttgccctgtctctgcagtggatggggagtgggactcgtggggggagtggagcccctgtatccgacggaacatgaagkccatcagctgtcaagaaatcccgggccagcagtcacgcgggaggacctgcaggggccgcaagtttgacggacatcgatgtgccgggcaacagcaggatatccggcactgctacagcatccagcactgcccctgtgagtgtcccacagactgtgctctgagggtggggtggcccatgcaggataaggggtttccaactctctgctgtggacctcacgtctctgcagcctccctctcactttcccaccaagacctccagttctgactctgtgacccctacccctcattgcagtgaaaggatcatggtcagagtggagtacctgggggctgtgcatgcccccctgtggacctaatcctacccgtgcccgccagcgcctctgcacacccttgctccccaagtacccgtgagtgagagggcaaagtatgcctgggagggggtcattatattacaggcgggagagtcggctaccccaggaaaccagggtttccactgctgaatctaaggtatctgccttgccgagtgccanctcccagctgcaggaagtggggagaaactaagaagatgagaaagaagttcttggaggataattcgtagcctctgtgcnnctcagtcacctgttcagtcactcatccacttagtccttcatgtgtcattgactccgancttcagttacccatgcttttagctgccatcactcaggcctccattcactgcctgcctcccacagtcactcatgcctccatccactttgtcakcatctcactgasscaaggcactccaaggctttttcagcaacakttgcagatncncncascccagatcctgtggatcctccaagggacccagctgagcaagcccctgacaggaggcatatgaggaacagctggtgcatgcaacaggtgctkccasctcaacctaggtccaggaagctgactgggcctcccagggcaggtaggggttgggaaaggcattcctggcatcaagactgtgaacggagccttggagctaggtgattagccgctataagtgtttccaggtgccagaggggcccaggtgttagagagggttaaaatgttcatcccttttcttccttccacatacatcaagctactagattaagtgaactattcccagctcgtggaagggctgccatctgggaagggatctcccggctgagggggttagagtggggcctgaagattagaggtgttgaatggaggcacaaaggacttgagtgagcgagagactgagtggaggaagaagcaattgagagaactgggatgggagtgaatggagggctttcctagtgggacaaataacccaggtaaagacctttctggacagggactgagcttgaataaagtggaggagacagagagagagattggcttggggcagggatttgggcccaacaataaggccttgaatgtcaggacaaggcattgggttttttcctggaggcagtggaaagagatataaagggtatatatttcggaggtaaaagaaagtagctcatgccaacaagtaacattcaccagcatttattgagcacttgctgtgtgccaggcactgctctgagcactttacctgaattaactcatttatcctcattcaaccccgtgaggtgagtattaatattactattcctaccattctcattttgcagatgagggaaaccgaggcacagagaagctaaagaaattgcccaatatcctatagctaaaaagtagtgttgggaggccaggcacagtggctcacgcctgtaatcccagcaacactttgggaggctgaggcaggagcatcacttgagcccaggagattgaggctgcagtgagctatgattgtgccactgcactgcagcctgggcaacagagtgagaccctgcctcaaaaaaaaaaaaggaaaaaaaaaaaaaaaaaaaktagccctcggcacatagcaggcactcaataagaattgaatgcattcttgccttccctgagattctcccttccgttcctccccacccctaatgcctcaggcccaccgtttccatggtcgaaggtcagggcgagaagaatgtgaccttctgggggagaccgctgccacggtgtgaggagctacaagggcagaagctggtggtggaggngaaacgrccatgtctacacgtgcctgcttgcaaagaccctgaggaagaggaactctaacacttctctcctccactctgagccccctgaccttccaaacctcaataaactagcctcttcgagttcgtctacgattccttaaaggaggaaaaacaacctatccccttccccaaaagtagggtgatagcatctcatagggcaaacagcacagcacgggccaagacacagcagcctgttgcggaaaacagtattttccactgtggtcgcaggttggcaggagtgaaagcgagtgtgcagtcccagcctctccccgccgctgccataaccccaatgtctgggccctgcgcagcccccttagagcctcagggccgcccggcacgttcctctgcagagctccgcgttacgggtttcctgattggctacttgtcctggcaggcacttyttgattggccggcgtgcttgttcg

SEQ ID NO: 330 - DNA, 5292 bp, Homo sapiens
ctcacaatgcaggcgctccagctctgacacgtgcacttctttattggaaaagaataaagcagtcactgatgtggcaggggcaggacacgagcagctgccgtcctcctcccagcgtgcctggcatggtcgcaggggagcgggtgcctggagtcccggtgacaccacggggcacactgagggagctgaggagccggggccgcgcagcctcctggatgctcagcggatcgtgtacttgtcccacttcttttcagggtcgtagggttcccagcggctggcgggaaagatgtgcttgttcttctcgtaccagctcctcagcaccaccttgcctgcatgggactcatccttctccacagtggcgtcactgagcaaccgcacatcgtcatgaacatcaaagttgaagagtggtccactcttcccccgtgccttggtgacgatgaagtcgtagaagctgtgatggtgagggatgatcaagtcctccttgatgtacatgagctgctccacccctgcggacctcagctcactgaagtctttccgaaggatctcgagcgccttctgcaggaactgctgcatggtgttgccctttctcatcttgactgtccgccggtgcccagagccatcccagtagctgaaggtgatctcgatctcctcactcttgatcttctcctgcttggcttcccactcctgccgcagctcttcccgaagccgattctcctcctcctcacggtctcgatcaggcaagaagcttgtgtcaacgtctgggttcttccccagttttctcttcttcgtggtgatctcttccctttccatctcctcctcatacatggccgcctcctcttcctcctcgcctccctcttcttcctcctccagggtgaaggacaggctggagatcttccgcttggcttccttcttacgctccttctctcgaagcttctccagcttcatctgcagctccttggactgctccttcttggccagctgcttctcccgctccttcaccagagcctcctgcttggccttcatgtcattcagggtcacgagacccacggtgctggacttgagctctgcctcccgggctgccgctggcaacatcgtgtcacccagctaagaaaatccgcgggcccgagccacgcgcctgtgaatcggagaggtcccactgcccgagtggagccgggctgagattcttctcaagttgagcctcagtgatcctgtggccgaagttagcgccttgacgtgggacaaccggacacgtcgccaggagagaactgaggcgccttctagcagttgtgacgccaaaatcacgtctccggagacccgcgccctccgccagccgggcgcaccctcgccggtagccttctttgtgcgccgtccggactcccagctcccggcccggcagccgagccccagcacaaagcagtcggaccgcgccgcccgcctcccctctcgcgtctccgcctcggtttcccaactctgcgccgtcgggccgcggcaggatgattgcctcgcatctgcttgcctacttcttcacggagctcaaccatgaccaagtgcagaaggttgaccagtatctctaccacatgcgcctctctgatgagaccctcttggagatctctaagcggttccgcaaggagatggagaaagggcttggagccaccactcaccctactgcagcagtgaagatgctgcccacctttgtgaggtccactccagatgggacagaacacggagagttcctggctctggatcttggagggaccaacttccgtgtgctttgggtgaaagtaacggacaatgggctccagaaggtggagatggagaatcagatctatgccatccctgaggacatcatgcgaggcagtggcacccagctgtttgaccacattgccgaatgcctggctaacttcatggataagctacaaatcaaagacaagaagctcccactgggttttaccttctcgttcccctgccaccagactaaactagacgagagtttcctggtctcatggaccaagggattcaagtccagtggagtggaaggcagagacgttgtggctctgatccggaaggccatccagaggagaggggactttgatatcgacattgtggctgtggtgaatgacacagttgggaccatgatgacctgtggttatgatgaccacaactgtgagattggtctcattgtgggcacgggcagcaacgcctgctacatggaagagatgcgccacatcgacatggtggaaggcgatgaggggcggatgtgtatcaatatggagtggggggccttcggggacgatggctcgctcaacgacattcgcactgagtttgaccaggagattgacatgggctcactgaacccgggaaagcaactgtttgagaagatgatcagtgggatgtacatgggggagctggtgaggcttatcctggtgaagatggccaaggaggagctgctctttggggggaagctcagcccagagcttctcaacaccggtcgctttgagaccaaagacatctcagacattgaaggggagaaggatggcatccggaaggcccgtgaggtcctgatgcggttgggcctggacccgactcaggaggactgcgtggccactcaccggatctgccagatcgtgtccacacgctccgccagcctgtgcgcagccaccctggccgccgtgctgcagcgcatcaaggagaacaaaggcgaggagcggctgcgctctactattggggtcgacggttccgtctacaagaaacacccccattttgccaagcgtctacataagaccgtgcggcggctggtgcccggctgcgatgtccgcttcctccgctccgaggatggcagtggcaaaggtgcagccatggtgacagcagtggcttaccggctggccgatcaacaccgtgcccgccagaagacattagagcatctgcagctgagccatgaccagctgctggaggtcaagaggaggatgaaggtagaaatggagcgaggtctgagcaaggagactcatgccagtgcccccgtcaagatgctgcccacctacgtgtgtgctaccccggacggcacagagaaaggggacttcttggccttggaccttggaggaacaaatttccgggtcctgctggtccgtgttcggaatgggaagtggggtggagtggagatgcacaacaagatctacgccatcccgcaggaggtcatgcacggcaccggggacgagctctttgaccacattgtccagtgcatcgcggacttcctcgagtacatgggcatgaagggcgtgtccctgcctctgggttttaccttctccttcccctgccagcagaacagcctggacgagagcatcctcctcaagtggacaaaaggcttcaaggcatctggctgcgagggcgaggacgtggtgaccctgctgaaggaagcgatccaccggcgagaggagtttgacctggatgtggttgctgtggtgaacgacacagtcggaactatgatgacctgtggctttgaagaccctcactgtgaagttggcctcattgttggcacgggcagcaatgcctgctacatggaggagatgcgcaacgtggaactggtggaaggagaagaggggcggatgtgtgtgaacatggaatggggggccttcggggacaatggatgcctagatgacttccgcacagaatttgatgtggctgtggatgagctttcactcaaccccggcaagcagaggttcgagaaaatgatcagtggaatgtacctgggtgagattgtccgtaacattctcatcgatttcaccaagcgtggactactcttccgaggccgcatctcagagcggctcaagacaaggggcatctttgaaaccaagttcttgtctcagattgagagtgactgcctggccctgctgcaagtccgagccaccctgcaacacttagggcttgagagcacctgtgacgacagcatcattgttaaggaggtgtgcactgtggtggcccggcgggcagcccagctctgtggcgcaggcatggccgctgtggtggacaggatacgagaaaaccgtgggctggacgctctcaaagtgacagtgggtgtggatgggaccctctacaagctacatcctcactttgccaaagtcatgcatgagacagtgaaggacctggctccgaaatgtgatgtgtctttcctgcagtcagaggatggcagcgggaagggggcggcgctcatcactgctgtggcctgccgcatccgtgaggctggacagcgatagaacccctgaaatcggaagggacttcctctttctctccttcttccctgttttaaattataagatgtcatccccttgtgtcagagacagaccccttggcttttgcttggcagagaggaccccactggactgggttttgtctctgcatctcattgtagagcttggtggctgagcttggccctattaagataaatagagttccaaataaggatttgttcacatgcatcataaccattcccattggttctcctaaaacatgaaaattatctcccttagtaatcccccttgccaaattccatgtccctgtataattctacaggatggggacactaatgaagatacggttgcttcaccttggagcctgaacatgacatttctaagtggggtgcatcccccagcactgatgttgttactgattctcctgtcagagatctgggaggtctccactgaggatgtgagcctgattatcctataggcagacgtggggagggtggaggggtgacagtggaggaaaatccatggatatccacgcagcagcccctctttaacctcatctacaagcatttgccctgtggattccagcatttgccattcctggaatcaaggaatcctgagtctgggcaatgaaaccaaagccaggagttgacgcatcctgcagttgggccagctgtcgcatctcagcggggcgcacatgttatccacaagcaatggacctttggggaagggggagtttttagtttgttttacaaatttttcctgcaaaagtggaatcactgtattttcattttaatttatatttgaaattttatttagttcttgagtagatctgcttcttcatcttgacatgtaatgaatggtcagttgtacgtaatgtatttatatgttaatttgttatgtatatagatgtgcaagtcttgtcagaattggcctcagtgtagttaaagggcagaaggggaagatactgactagtcatagaaatacctcattcgcctgtgggaagagaagggaagcctcttcagggtgagtgaatggcaaagcggttgcttctccg

SEQ ID NO: 331 - DNA, 12003 bp, Homo sapiens
  misc_feature (7240)..(7240): Each "n" represents a nucleotide selected from a, t, g or c, or contains no nucleotide.
agctcacagtggggtcgaggagacacagcacaggcttctgaaaggtgccctgtccattagggagcaccccatttacagatgggtcatccttcagctcactagtttcccagcgcatgacagtgggtagcttttttttttcctattataaacaaatcttcgatgtgactgcgatgatctacggatgatctacgtatctggttgtgtgatcctcaagcacttatgcaaggtggagtgtaaacaatggccaagacccaaactgcaatgttccctgaagtccaacctgcttggagtccttgggaacgtgtacaatggttaacaggcttgagaggagtcagctgggagagtgagagcgagactgccctgcagaggggccgctgaggatggacccctgtaggccgtccacacccaccacgcgtgtcatcctcaggaaatgcaaccggatgctcggaatttcgcccctaaagcgactcagggcagtctcagctcaggaagacttctttttttgaccttctggcttaaagccacaaccccaggctgaggatgccacatcaacggcgtttcctcgccacgctgcaggcgtgactcacgtttctaagcctgcagggtccccgggccaagcgcggctactgagagcacagcgtcctccctcagcccctgctcatctgcacggagcaaagccgcagctttctctgctgtcagcgctttatacgactcggatgtaggctctgagcgggcacgggcccgccctcagacggcgacccgaggggcaaacaggatggaggcgcgctcccttggaggctgtggtctcgattttatctgctcctgggtggtgcgggtggtttgctctctaggcgtgagcaaaggccacaaggggcccgaaaaaatcacccaaggatgcaagcccgccattgcgctgagcaggggcctccccgccgccagagcccgcgcccctccagggaggcccgcgcgatcgagacccgccgcctcccgaccaggcgcgggacaccaggcgaggggagacaggagccgggaggggaggggccgggcccgcaaccccacccagtcctgcctccgcctcctcccggtaggaccgtcccctcccaggccccagctccgcggccgcctcaccagaccgcgtgcggacgggctcgcgggcggggcggggcaagctcaggccacgcccctgggcggtgcgcgcgggcggtgggtaggccgggcaggctcacgtgatgcgggccccgcggcccgcggatataaacccgcgcgcccgccaggcgctgcggccgtcccgggccgtgactcctcctttcccccgccccgcctccgttcggagagccggcgggcgggcgcctctcggccaggtacgcggccggctgggataggggtcgcgggcgggctttggtcgcgcagcagccggtcctccccggaggtaggcgggcgcgggccctgttgggtctttgggacgcgggtcccgctggggccggggatgctcctctctgtgagcgcggtcccgtccccccctgtccccgggcgggcgcacgggggtctaaccttggggggcggcgctcccgcctgtcccgggtgccggggttcgcgtcccgcggggccttcctcgctctttgtctcttctgagtgaacttgatgacccccttcttccaggaagcgcctcttggacgcgtgtgaccgatgcccagattgcacgaccacttctggagctgctcctgtgcgcacagcgcgaggcgccgaggccccccgcgagccagcaccgcggggctgccgcccaaggttggggagatgatcaacgtttccgtgtccgggccctccctgctggcggcccacggtgccccggacgctgaccccgcgcccaggggccgcagtgctgcgatgagcggccccgagcccggcagcccctaccccaacacctggcatcatcgcctgttgcagaggagcctcgtgctcttctcggttggggtggtcctaaccctggtgctcaacctgctgcagatccagaggaatgtcactctcttccccgaggaggtgatcgccaccatcttttcctccgcctggtgggtccctccctgctgcgggacagcagctggtgagtacccctcctggttcttctggaagtaaaaagggtgtcttttcggttgaaagtacttttcagcctataagaaacatgcatttgaaactggaactatccacagattgaaagtgtgcatctccagtcttgggatttagagaaatgaaggaggggtagagaggacctggcacccccgagggcgggttcgggacacagctctctgaagtttgaggaagcacagtgatggagatgaggcagggagataattggctgttcaagcaggtgctgtgccaagttgactgagggcccttccctcctggcgtccgggtacagccccagctgtcatcccgcgccagccgccccggattggccgcctggggaactggtgagcagcgggactgaaaggccattggtcgcggcagcaaacatgctaccctgctggataactgaaaacaaacccgtcacatgggttcaggaggcggttgccaggggagcaacttctcagcacttccttttgccgggtcgctgagtaaactgtggtctgaagccaaaccgcctacaccctgaactgttagagctctgtagattacgttcttaagaaaagataccccttacggcgtttagattttcgtacacccaagcagtagcatagatgctgtacaacgtaacactgagtcagtctgaactgtggacacggggactgctgggtgtgtgtactagactttcttggctatcattgacccgcttttatagaaatgttgagttgatcttggctcagcagatcacttactgctcctgtagtcacacagcatttgtttatttaacgagcttgtcgggtgctttctgcaacctcaactctataagctgttgaaatgttaatccaaaagtgagcaccacaagcccctatccttaagcagcttagagtctggtggggaaaacaaaccagtatgtcagtgactccagtgcagggcagggagcatcctgtttgctttgtggctgacgcctgccagctgactgctgaccataggcttcagatgctttgctgtgttcattccttacagcaatgccatttgtagcttcatttatagatgtggcaactgaatcacagttgaagtcaagcccaaggttggcgcaggtagaaagggcccaagccatcggtggtagactgctccttcttgccatggtagggtgtgtctcctgcactgtggaaacacattgcctcagttgactcactgaaaacagcaagcagcagagaggtttgtagcagattaaacagggggctccgtgttgaagaactaggacaggtgtctgtaactaaaaagtagtgggtagaatgttttcatatgtgttctcggagggacgggttcctctgtcgtttgtcgaaacacattatgtggctgttctaagtgaacactttttgagaacgatatctagagttgaaattccatgtttcatatacagttggcagaatagtttctttcctttaaccctaaaacttgatcttagaaatgagataggtagccttcagtagttgtaattggatcctcaagggtttctaggaatatctggacaatttctcatactctcatattctacttttttttaaaccatcagccaagagcataagtaaaatttttcatagtatgttttttacctatttatttattaagctatagtgaggtaaagttaatttggggggtccatttttcagaactccaaaattagaacctgatgaagtataataaattgaaaacaacattttttatctgaatgtttgatgcaaactgtgtttcttgtttctcagttgaacctaaaaggtatatttctttcatactagactgaggtgaaacaattgcagggttctcaagagccctgggacacagtgacccttgtgtcccagcatccaaccccacggggcggcaccccactcccccctacagacattcattcctgccttcatctttggcattttacttctcttgggggaatgccattccttcccacctgtccaaattccaagttcgtgtctataaagaataactattccagaccacagtgatctctttctctgtgtcccagttacataatccttataattttacacatgagaaaacaaacatgcagagccacgtcccatcagagggcaagctgggatttgaggctgagttttctcttcttggtctggtgttctttccgcagcttgaggcttgaccatgcgggaaccagatggagaataagcgaagcctgtgtggggctgtctcgccccgtacttgcccatgtgcatgtgtgcacagtaggtgctcagtgcctcgtacagaacatgctagaacccccgaaaatcaactccagggtcactctaggagcatgtgacccagactgtcaaagtcacatcagcaaatatgtatctcatcacgtgccccaggcccagtactgggtggtggggaggagtgtcaagagctgtgatgtgacagggggtggacagatgctaacctttttattgtaagatagaaatcacaccggatgaaaagacaaggtggaactacatagtcatttaagttctgtgtgctttaggcaaatgtggatattaaatataaggttacaatattgctcatattaatatgaataatccctgcttgattccttcctgtgtttactgagacatgttcaactacactaaataatagtgatttttaaaaaacttttcccaaacagtacaattttgtgggagtggtactcaaagagaacaagaatataaaatcactctgaagttatagctgataattttttctaggaaaaggactggtttgagtaatgtactgtgttactaatgaccacgttggaaattctggaacttggaatctgctgtattctaacattggcaactttttttaaaacagctgttgttggcctactgtacccctgtatcgacagtcacctcggagaaccccacaaatttaagagagaatgggccagtgtcatgcgctgcatagcaggttttggtggcattaaccacgccagtgctgtatccttaattttctgtgctacgtccagagtatcttcttaggttatatattgaagcattttgttttgttatatactcaaatgactccatgtcataatacagacatgatggtggtacctacccatttcagattactaaaaagagaaagaagaatggggctatcgatgacttcatagcaaaatatattgttttatggtcaaaataaatataaaattatttaaatttttatatatattaaaaaaatttttaaaaatatatataaaatatataataaatatatatttatataaatatatataagcactccatatatagctttcagcaagttcattctcatggctaagtttctgactcagcgatggcagggagatttcaggtgatcttaatgattactgtaacctgcatccaacaaatcctttctttagctcattacacaggctttatggacagtgaattatctgtgggacaataataaaatacccatgtttttaacccttgtggttttacgtttttttatcttaataagagtcaccgaacttttccttaacttttatatcaccagaaattggattttgccaataatgtccagctgtccttgactttagcagccctatctttgggcctttggtggacatttgatcgttccagaagtggccttgggctggggatcaccatagcttttctagctacgctgatcacgcagtttctcgtgtataatggtgtctatcagtatacagtaagtgtgtgttttcaaatattggctttggaaagcttagatattttcatattttatttgttttttatatagaatgatacagatttaggcatgaaattctcaaaaatgctgctatccataacttaatgtaacgcaaaggaaaaccaagtagtagcagttacaaccaaacaaatatgaacattcgtaacattggatggttgatatgcgttctgcatatccccactacagagaatctgtgatgtagaattgagccaggtgaaattgactgctaaggtacagtttcttttctcgctccaggtatacgtccccagatttcctctatattcgttcttggctcccttgtatatttttctcaggaggcgtcacggtggggaacataggacgacagttagctatggtaagtgaaatgatcatattatcttctaaaacttgcttctctttaccttgatagaatgactttacatgatacattcaaatttgcgttcatatattctggttcagacttgagtgacaactactgagaaaagcttggagtccggatcaagcaacctcccgcttcagcgtcccgagtagctgggattacaggcacatgccaccatacccggctaacttttttgctttttgtggagatgttatctccctgccttgtccaggccgggctcgaactcgtgggctcaagccatcctcccaccttggcctcccaaagcactgggattataggcgtgagcctggccttgctttttttaatattaaaaatctggtcggatggtcccacatggaaatagtatgttgttttcatgcattcgccatcatccccgttaatagtcttcccaaaggagagctggcaacctccatcattgctttcttgctttgagatttttgtttcgggaactctctttgggagagaattccctaagaaggtttttaaagaataaaattgtcctcaaccagattgactaattacacattataactacaacttgaataacatttaaagagttgggttatttcttgtttgataggttggatgcttgttatatgtcaagcctttttaaatcggttttaagaaataagcattattttggtggaggtagaaatttcacaacattcataagttctaaacatctagaaatggttggaggaaacattttcgttttgaagatagtttcattaagtaatccctgctgtgctcctttgcttacagaaaaaaatgttaaagataactccccataggatagttggtgtaattataattctccttacttcagctttctcttcatcctttttattctttaagcttgggggaaaatgtttggatgttctcgtatcttaaaactggaggagagaggctgggcgcggtggctcacgcctttaatcccagcactttgggagctgaggcggncggatcacgaggtcaggagatcgagaccatcctggctaacacagtgaaaccccgtctgtcctgaaaatccccgaaaggaaaaaaaaaatacccaggcgtggtggtgggcacctgtagtcccagctgcttgggatgctgaggcaggagaatggcgtgaacccgggaggcagagcttgcaatgagccgagattgtcccactgcattccagcctgggtgacagagcaagactctgtcgccgaaaaaaaaaaaaaaactggagaagagagatcaccaccttaatccccttccctactgggctatcacatgaaactgagctctgaggttctaagcctaacccgcctaccactgtttttattcataaatacttaaatccttacctctggatcccaactgttactctttttttcacttcaaaatttgcaaactcatttctatccatcaaaccccggaaatggcccaggggcttcacagtgcagtcccctccctcctgctgcatccgttcctcaggctgtgccccaggttgcattcgtggtgcgtgttttctcccagggcagccttccccacattccactcttgtcatactgttgactcacaaaatggaagtggctgaatgttccagggatagtgtctaagagctattggtttaaggttgaaacctacaccaagtaaggctttgtgaagggagatgacgagagtgaagttgttgacagtctgaaggtgaagagattccgagggtcagttcagcaccgggaccagacccgcccagatccagggtaatttgaggtctgtgtttgggtgctgatggttttggccagtggactccacaacctctccttcttagctgtctcaggtctcttcagatgccttgggtcttaacttatgcttccctcccttaagaagaaacatagttaattggcaagaataaccatgctcaaaaagttacaagttgggtttgggttcaagttatatgggcttcctagcttttctatgtggtatttccccccacacatgccgttgtcctttgtgtccgaaaatacagcagaaacatttgttatcagcctgttacggtttttttgtttgcttgtggtttgtttttatttgtacttttttggagacggagtcttgctttgtcacccagactaaagtgcagtgggacaatcttggctcactgcatttgaaccgtctcccaggttcaaatgattatcctgcctcagcctcccaagtagctagggatcacagggcgcccaccaccgcacctggctaatttttctgtttttagtagagacggggtttcgccacgttggccaggctggtctcgaactcctgacctcaggtgatccacctgcctctgcctcccaaagtgctgggattacaggaatgagacaccgcgcccggcccagtctgtatgtttaaaaaggaaaatgagtctgtaaccatcatttattagaacttgtagtatgttgctgtgtgtagcttcaagtccttcctcaagagtaagctgcaaactgccaacagaaatcaagcctgtcctgttgacactgcccggccccactgggacacctggagggagagtcccccccacctcagtgtcagattggaatttgatttggcggtcctgtttgtgattgacccaatacagctgctaatgataataatactattattgttattgagggtttacatttgttgggctcttactgctgcacaggaggcattgtgctgagcgtttccattgttaggcagtttagtcctcatacacaagtctttggagtagaaactattattagcccatttctaaaaggggaattagcagcttaggaagattaaacagcttgaccaggtgggtggcagaggtcgacgttgcaagccgacttctcattagcataccacactgccaataccaacacaatgctcgcactgtctcacctggaagcaggttacagcagcctgcgttggtgtctgggttgccatttacaatgtgccaccattaggcaacactgctggaagtccctgtgccacgtgtcaggtccgccccggcctggctgtcgcccgcctctggcgtctctgccaggcctcactggggtctctgtcgaccagggattctaaaagtccacttcccatctatttattcagtacattagggaacagggagtcaaatttttgttggcccaagtttcctttcccgggtttgcttgcccaagaagtttgcccgttttttgttttccccccccccacggtttgaataagaaccccctccccagttgtgcaaaaacccaagaaacttgggcagttccttttcacctttgttccaattcccttgaaagcattgtattgtttccctaaggaagtccttaattgtgttttgtcccccaggggtagtaccctggcaataccctggttgactccaacccagactcatgactttcttacctgccctggttttgttcaagatgagaggctcttttggcctgttttctggatgagtaatctccgtcattgctgaagtgaggagctcagctccttcctcttaaagtgagtggagggcaattaagtaacgtgggaagtcacgattctgagggaaaaaaattctgtatggagtttctcttttgccctttagcagaagctccgtgacctcaggaaggtcatttaatctctctgtctttgcttcttcatcagtgaaatactgttctccattaagaatttaccctgaggtgcctggtcatagtagtaactgtagtgtctacctctcagaagctctgtgagggtcagatgaggaagaacatgtagaaaggatttcccaactgtgaagctctgtgtgaattgagggcacacagagcttcagtattacaaagcatgacctatttccaatgtctgtttcaacaaactgctggtaaggtgggttataacacaggcatcagatactaataaaggtttgtggcagaaacctcccttcagataaaggttcaatcccttaaattgcagttagaactttcaggaacctatcataccctaagcatcaccatgctttgataaaattgggtgtttcctttatatagatattaatttagttaaactttcaccaagtcttacacttacatggtggctttaataagggcctcagcagcgtaatttcacctgaggcagagaattatcctaattttgcaggtgagagctgtggctcacggggccagagccatgaagacggcgcaggggagctgggagagctggcctcggtctccagttctctgcacatgtcccacctctcaatcttgttgcttcagtcaaagaaagtgtcaatatttcccatgttaggacctacttaattggtaattaaaatatttatacatttagtgctaattttctctttccttttttttttcctttctacacatagggtgttcctgaaaagccccatagtgattgagtcttcaaaaccaccgattctgagagcaaggaagattttggaagaaaatctgactgtggattatgacaaagattatcttttttcttaagtaatctatttagatcgggctgactgtacaaatgactcctggaaaaaactcgtcacctatctagaaaagtcaagaatagggaggtggagaatgatgacttaccctgaagtcttcccttgctacccacactggcgcctgtctgtgccctggagcattctgcccagcctacgtgggttcagtcaggtgccaccttcccaagtattcgatttcattcatgtgattaaaacaagttgccatatttcaaagccttgagctaagactcaattaccaacccgcagttttgtgtcagtgcccaaaggagggaggttgatggtgcttaacaaacatgaagtatggtgtaataggaataatatttatccaaaagatttttaaaaatagggctgtgtttaaagaaggaatcaaaacaagaaaagcagcagtgattatagagaggtcacactctaagtggggtcgcggcgtggccacgcttcacggtcacgctcgtccgtcctgcagtggcgtgtttacatggtcacacgtgtgtgtatcaccagtgggtcaactgcttgtcattcctcccgcggcagtgttgtgtagacaatcttactgagcaaaaggcaatgaaaagtcttgggctcccacactgcgatatattggaattcccacctcagtttatgaagtttatttcgaaatccatagtcatctaagaatgaatacctgtctgccatgtatttcaatcttagtgagccaaaattgtttgtttgttactacagaatagagatgactgttttttggcacagccctatggaatttgcaatctgtgattgccttgtaaaaaggagagtgcatatggcactgcattaaacgtgtggtgtttctagtcaatgatattggtgagcacaatgtattcatttaatggcatagaccataccagacctaatttgcaagtattgggtcttcaaacttcaagtgcaatgtattatgaaaaccaatctgagccttgtatctcttaaatatttattccttctaacgtgtgagatgtcccgagagaagggttctccattcatttcagtgctgcctggaggaaactcggcaatgatttcttcagttgtgaagttcctttcgggttacaacctccactggaaccctcaaccttcgaaatactccagttttgggggttggggccatttacttataaatttaccgccgggtttttggaatctacatgtcttgggggcgggctcaaattcttcgaaagtggttggattaaaa

SEQ ID NO: 332 - DNA, 662 bp, Homo sapiens
accgccgacgcagacccctctctgcacgccagcccgcccgcacccaccatggccacagttcagcagctggaaggaagatggcgcctggtggacagcaaaggctttgatgaatacatgaaggagctaggagtgggaatagctttgcgaaaaatgggcgcaatggccaagccagattgtatcatcacttgtgatggtaaaaacctcaccataaaaactgagagcactttgaaaacaacacagttttcttgtaccctgggagagaagtttgaagaaaccacagctgatggcagaaaaactcagactgtctgcaactttacagatggtgcattggttcagcatcaggagtgggatgggaaggaaagcacaataacaagaaaattgaaagatgggaaattagtggtggagtgtgtcatgaacaatgtcacctgtactcggatctatgaaaaagtagaataaaaattccatcatcactttggacaggagttaattaagagaatgaccaagctcagttcaatgagcaaatctccatactgtttctttcttttttttttcattactgtgttcaattatctttatcataaacattttacatgcagctatttcaaagtgtgttggattaattaggatcatccctttggttaataaataaatgtgtttgtgct

SEQ ID NO: 333 - DNA, 14131 bp, Homo sapiens
gatcgtggaagcctccaactccagcacagggggggcccgcactccttggtgcctccgcagtcttcgaacagacggggaaactgaggccctaagaggcctaaagcctacacttccccgcggaatgcggcgggcgcgggcgggttaaaggggcggggccggcgctggcccagcccgcggctccccccagcgccctcgccccggcgctccctagcccggcgcggcccggcagcgagagcggcgccatggaggccaccggggtgctgccgttcgtgcgtggcgtggacctcagcggcaacgacttcaaggtgagccgggccgggcgcgtgccgggcctccctgcaggccttctcttccgcccggcccgcttggcctccgcttcctgtcccgctcggctccaggccctgcgtgtcccagggactgcggccggggcggggtggggctctcccctggccaggaatggacctccgaggcctccgcccagtgcctgtacggggagaccgaggctgggcaggccggggacggacgcttgggctcggagtcccgccgggggcccggccgggagcccccaccccgcgtccgtgttctcggtctaggctggatggtggcctggggatcgggcgagcctccccgcccctctgaggtcacacgcccaagccaggccctgactcagggatggctgcccggctgcccaggggcgggtgtggagccgactcatcactgccctctccccgccaccgccacccgccatactgtgtgatcctgggcctctcagatcacttcccctctcagagcctaggctttctcagccggtgaaggggcttaaaagtctcctccttggacgcaaggagtatagtgagatttgttggtgtggagagtgtgtcaggccggtgtgccaggtgctgggtggcagttgtctgagcagctgctggactgagagaaaagggaccggagcccagccctccgcagccagtgggtggggcggcggggtggttccaggactcaagaatgagacaggcattgcctgaccaaaggggaagcagagaaagagagggagggagagctggctggagggtcagcctcaccttcagggtgggtgactggcagggtcggcctgggttgttggtctggggctggggccgaggaggcaggtttttcctgcgtttacctgcctgtgtacacacctttgaccccaagtacaagtggctacaccacttttccctgaccccatccccaccaccctaacctggggtccccgttcctctttgctgaactgggagagtccgagtcaccagctgggaatgtggcgctagggggaaaggaatatcagccgcaggcactgaaggcacctactgccccagacttggtgccacaagggctggaggtgccgaggtgggcgttcacacaccaggggagtgcagtgatgctggcctgccctgcagggtggggagccacggtctccgcaagcaagggtttgaccctggccgtgagttgccagtgtgctgatggcaggatgagggcacaggtggcgcctttgcaaaggcttggaagggggatcccccaccccaggcagccagtcagagtgtggaatgctaggtgaaggaatttgagccgagctaaccacagagccggatgctgggctttcacctgaaacaagccagttttgtcctggccctcctggggcccagaatccagtaggagagacaaatcttaggccaacacttttgtcacgggggggcttaaaattcccattctatgggtgaagaaattgaggcacaatgatgaaatgacttgtctgtgttctcacagatggtgagagttggttctgtggctccccaaaggctcccatgggctggaggagccatagaaggtggtgagcaggggctctgtgcttcaccttgacatccttcccccagggcggctacttccctgagaatgtcaaggccatgaccagcctgcggtggctgaagctgaaccgcactggcctctgctacctgcccgaggagctggccgccctgcagaagctggtaagggggtttgggcgggcaggggagggtccctgtggatgagccaggtgggcagagcctgtggagaaggcagacaacttctccagagagaggaacaccgacagctatgagcagagctggaagaaagggagtgggcaccctgtccagggaggtgtgcaagaagaggccgggtgagtgagggagggaagctgcaggggtagttgggccagtgtggctgaggccttcctggatggtgcagagttgtggaggcaggcagggactctggacaccccacccaccctgctgagcctgtgctccccattccggcccaggaacacttgtctgtgagccacaacaacctgaccacgcttcatggggagctgtccagcctgccatcgctgcgcgtgagtgctggccgggaggccaccgagcttggggttggggccaaggtccggtcagggacgtgaagcctgggctagacaccaagctgggccagcatttctgcccacctccgtgtcaggctcagaggctcaggtgtcacagaggggccctctcattagaggttacagcagtgccctgtgtaaagtaacccatgtggatcagagaattccatcaggaaaaaggtaaagaaatccaaaatcttaccagccgttatggacaataactacagtaataatagccaagactggctgagcaatgttcccactattctgttaggattttttcatatgctctagccctccactaatgttgcagaagagaaacttggccaccaaggcagattacttgccccaggtcacagagccaggcagtggtagagctggtgttgagtggggtttggccgggagcaccgtgtaccttctacccaagacttgaacgtcccagaacatcaggcccttggccagaccctgtaggcctcaacgagggccatcccatctgaagtcagagccctggagatgtttagggcacagcttctgacttggactctctgagttcaaagctgggctttgccacttcctggtgatgtgactttgtacaaatcgcttctaccttctgggcctcctctgcaagtgcagtggttgggaggggcagcagtgaccccgtgaagcagcagcagggtgccgcacaggcattcagactggagaagtggcggggcagctccggtgactcccgttgtcacttggagtcacgacaccattctctggccctgttccctcatgctcaagctttctgcatgtctgtaaggtatgaggaggtgtcagtcttaagttagggagagaaagcagacttcctctccatccagattctgatttctctgtggtccacttctctccctctgttctgaaaaccctgactcagaccttacccctatctcaccttctggaattaagaagaagagaaatggtttgaacagaaaaggttccctgagggccctgtgctggggctccggggcacatttgagctgggctttgaggcatgaataggagctcactgggaggctaggaagagcgctccaggagagggagctatttgatcaaaggccagaggtgagagagtcctcaggcctggcctctggtgagctgcctgaggaggtgtccctctctagactctgttccttcctgagagtggaagccaggaattatagactcttatggtttattcccaggccatcgtggcccgagccaacagtctgaagaattccggagtccccgatgacatcttcaagctagatgatctctcagtcctggtcagtggctacccactcacctggcccctgtgctagccggaccattcaatccccactcactataaaagtccctggggccattgttatcccattttgcagatgggaaaactgagtcttggagtggataataccttgcctgaggtcacttttggagtcagatccctaacacaggcactcttcctcccaagtccctggctgtctccctttggccctgaagccccctcatctacccccacacccaactcagtgccctgcctgatccccaagcttggcagacgcctggtggggaggagactcccctgacctgggtcttgccccttctacccaggacttgagccacaaccagctgacagagtgcccgcgggagctggagaacgccaagaacatgctggtgctgaacctcagccacaacaggtgccaggccagtggggggcagggggcaggtgggccctgtggggtggctggtgctgactcaggtggctcctgctccccacccgtagcatcgacaccatccccaaccagctcttcatcaacctcactgacctactatacctggacctcagcgagaaccgcctggagagcctgcccccgcagatgcgccgcctggtgcacctgcagacgctcgtgctcaatggaaaccccctgctgcatgcacagctccggtgggcgccccctcggaccgcactcctgcagaagccaccctgaggagtctggccgggccccttcacttcccagggccctaacccttctcccttaggcccagccatccctccgtgcaggcagcacccctcagtgtacaacctcctaagtatcatgtccacctctcagtcctgtcttcccgcttacacaccccgcaaccacccttgggcttgtcccttcaaccagatgtgacctcacacctaccctctgggccctgtgcttttggtcctgccctgccaagccccacccttaacactccctaggtgggccctggccctgaccactcacgtcaccctggcaggcagctcccagcgatgacggccctgcagaccctgcacctgcggagcacccagcgcacccagagcaacctgcccaccagcctggagggtctgagcaacctcgcaggtcaggcagccccaggagcccctctgagctcgggccccctctgggccctcttgcttccttgggtggaaggggttgaaccctgctcttcggaccaatacccagagggaaaaggctggagttatgttacagtgacttttgcgattatgatgatgccttaacactgactttatgcctagaaaactcccccgcaacccccatgtgagggagtttgtccaaatggagaaacttgggcgcacagcagttgtcacttgcctaagccacacagctcagaggtggcagagctggggttcacactagggctggctgccctggcacctggtgtatgggccccagctgatgcaccccaccctgcaccccagacgtggatctgtcctgcaatgacctgacacgggtgcccgagtgtctgtacaccctccccagcctgcgccgcctcaacctcagcagcaaccagatcacggagctgtccctgtgcatagaccagtgggtgcacgtggaaactctgaacctgtcccgaaatcagctcacctcactgcccgtgcgtctgaggccctcagtagggggatgggaggaaggccgtgagcctggccctgacctcccacccctgcccgttccccctccagtcagccatttgcaagctgagcaagctgaagaagctgtacctgaattccaacaagctggactttgacgggctgccctcaggcattggcaagctcaccaacctggaagagttcatggctgccaacaacaacctggagctggtccctgaaagtctctgcaggtgctgggcagggctggggctagcagaggcacttgcagcacagagaaccccgggatcgtagtcagagcccaccttgtggtctgtgcaagtcagacaaaatgaagatgggttaattcaccttttcttttcttttcttttcttttttgtttttgagacagagtctcgctctgtcgcctgggctggaatgtagtggtgcaatctcggctgactgcagcctctgtctcccaggttcaagcgaatctcctgcctcagcctcctgagtagctgggattataggcgtgcgctaccacgcccggctctttttgtatttttagtagagatggggtctcaccatgttggccaggctggtcttgaatgcctgtcctcaaatgatcagcctcccaaagtgctgggattacaggtgtgagccaccacgcccggcccagttaactcacctttgtggatgaagaccacagtcccatgccagccattcccaacttgagcccctgagagcacccttcggggggcactgttagggacaaggccacatgacgtgggaacgcagtgttgcttctctccccttctggagatcacagtgcccgtaacatggtctcttggctctgagaagtccttcaggcagagaatggagacccccgccagttcctctgaccctacctgcctcccctccccaggactaggggttttcttgcccacttccccttgtctgtcacctgcctgaggccctggctggccctgtcttcacaggtgcccaaagctgaggaaacttgtcctgaacaagaaccacctggtgaccctcccagaagccatccatttcctgacggagatcgaggtcaggcatgctgggtttgagagggctcaagagagacaagcaaggggtgtgccctggagcaagggggacccagcagaggcctcctgagggaggtggccagtgccagggtgcccgtggggagaaggtgggccccacctccctgcatccagagtacattccacagtctcatttaagcccccagccagccccagaggtgggtgggaggagaacccagttccctgacctctcagccctggcggctgcagacaagagcaagaaactggattggtgtgtctgggaggtaggacccaggctcagtgccggctctgctcaccctatggggcaggtcctggatgtgcgggagaaccccaacctggtcatgccgcccaagcccgcagaccgtgccgctgagtggtacaacatcgacttctcgctgcagaaccagctgcggctagcgggtgcctctcctgctaccgtggctgcagctgcagctggtgagtggggaaaggtctggcctgggaacgggggctcctctccaggcctcaaatgacacatctgtaaattgggtggcatacagctttctggaccctggtgggtggagttggcccctggttggtcgcatgcccaagggggcagcaggcccagtgagggctcagctgtttgcccctcccctaagcagggagtgggcccaaggaccctatggctcgcaagatgcgactgcggaggcgcaaggattcagcccaggatgaccaggccaagcaggtgctgaagggcatgtcagatgttgcccaggagaagaacaaaaagcaggaggtgagccaggccagggttgggacaaggcagggagccttagcttctgctgaaggccgaccctggccttgaccctggccaagagggacggggggtgctgggcagaaagaacagctgtgcaaaggccctgaggtgtgggtagcaagtaaagactggcctgagtggcttcacagagtcaagccgtgctctgtgactctgcccccaggagagcgcagatgcccgggcccccagcgggaaggtgcggcgttgggaccagggcctggagaagccccgccttgactactccgagttcttcacggaggacgtgggccagctgcccggactgaccatctggcagatagagaacttcgtgcctgtgctggtggaggaagccttccacggcaagttctacgaggctgactgctacattgtgctcaaggtgagggctgggcatgctgttaggggccatgtggcccagtaccttcctctaagatggctcagtccccaactccagagttttgttcagggaggccaggtgggaggtgggcaggctgcaggaggtggtccaggcacaggggcagtacaaagcccctggggctgggaagcctgtgctgttcagagtggcgtctccggggtggccggaagaccaggatgaaagctgatgtggccggtgccttggcttccagacctttctggatgacagcggctccctcaactgggagatctactactggattggcggggaggccacactcgacaagaaagcttgctctgccatccacgctgtcaacttgcgcaactacctgggtgctgagtgccgcactgtccgggaggagatgggcgatgagagcgaggagttcctgcaggtgccagcccgttaaaattgggggtgggcagagtggggttcccagggaactctggtgcaggggcagtgggcccaaggcaggtaggcagaacaggtgggcaggcagggagctggggttaaagggggtggatcaacgatactgtgcgggacctaaggcagaccgcagggtgaggtctaaggtggccaaagcctgggtcagcaaaggagagttctggaacgcggggcagaattcagccgggcaaggataagggtacaggctgggcatgggagctagaccagtgggctgacacaggggagctgagagtagggtggaaggggtgttgccaagagcagtgagaaggcagggccaaaacctgttattaggaggcaaggacacacctggatgccaaggaggtggggccaagggcgggaccagagtccagtcttgaataaattactgagcagtgttagccgccagctggttacacctagacatatgttcgcatgtacacacacgtggagtttatgcacacaccccacccgccccgagttttttttacccacattcacccaggtttccactcttccatgaacccacttgcttgtgtaccctgatatgcgtgcatctaaacatgctgctggcatctttacaaacgtgggtgaacgtgtccatatttttcatacatcccaacaccccgacgtgtgtatgtttatagacacagatgtgtatgttttattttagacagactctcgctttgttgcccaggctggagtgcagtggcacaatcttggctcactgcaacctccgcccccagggttcaagcgattctcctgcctcagcctcccaagtagctgggattacaggcatgtgctaccacgcctagctaatttttgtatttttttagtagtgatggggttttgccatgttggccaggctggtctcgaactcctgaccttaggtgatccacccgccttggcctcccaaagtactaagattacaggcatgagccaccgtgcccagccagatctgttttttttgttgttgtttgtttgtttgtttgtttgttttaagacagagttttgctgttgttgcccaggctggagtacaatggcacaatctcagctcactgcaacctccgcctcccaggttcaaacaattctcctgcctcagcctcccgagtagctgggattacaggcatgcaccaccacgcctggctaatttatgtatttttagtagagacagggtttctccatgttggtcaggctggtctccaactcctgacctcaggtgatccacccacctcagactcctgaagtgctgggattacaggcatcatagatttgtagcactcaattcacctgtatgcaactctgtacccccacctgaggggcagtggttggtgggggagggggcagctcagtgatgaagaaccacaccctcacacacacaggtgtttgacaacgacatctcctacattgagggtggaacagccagtggcttctacactgtggaagacacacactatgtcaccaggtgagggtgtgtgggcagtggggggtatggacctggagtctgctggcaaggggtggaggggagggtgttggggctaagttaggcccttggtgcctacactgagccactcttgccctgcgcccaggatgtatcgtgtgtatgggaaaaagaacatcaagttggagcctgtgcccctcaaggggacctctctggacccaaggtgagccccaacaatgtgaggtgggggtgcttcatcctcagcctcctccccaccagtgggggcaggtgtgggcctcttagaagaggaggccctctagcaattcctgcccacgagcttggcggggggtccctggggcttacccagaaaccccatagtgagggattttttttggtggggtcaggagcatggggtgaccattgccccatgcaccatcacagctccttcctgccccttcttgtccaggtttgttttcctgctggaccgagggctagacatctacgtatggcggggggcccaggccacactgagcagcaccaccaaggccaggtacaaggacaccgtggggtcttttgtgtgaaggaaaggggtgtgagcctcgctgatgactttgcatcctgctctcaggctctttgcagagaaaattaacaagaatgagcggaaagggaaggctgagatcacactgctggtgcagggccaggagctcccagagttctgggaggcactgggtggggagccctctgagatcaagaagcacgtgcctgaagacttctggccgccgcagcccaagctgtacaaggtgagccctgctgctgaggcccaccttggcctcccaagttcacccaccgactgggggaatggactacacaccgatgtagttggctttgggctccatctcgactttggtggggagagggtgccaccttctggacaaggaacagtatgagcaaaggtctggaggctgcttttgagaagtagcctcacggagtctttccaggatggtggggccgtaggggagacagaagcacctagtgccagggctgggaaccttggctcaattatctagattcttgtgaacaggaaagggacacgttaattagaaatggcatgaagggcctggagagggcaggcagggaaaactccatttaaaagcccttctgaaaggatatccctaaaaagaccttgaaggggagggggaaacagaagcagtcagtgagccacgctgcagggcagggctggttccagagcagagggctgtgtgggtgaggttcctgtctccagatcccttccctgccatgctcatccttcctgccaggtgggcctgggcttgggctacctggagctgccacagatcaactacaagctctccgtggaacataagcagcgtcccaaggtggagctgatgccaagaatgcggctggtaagagatgcaggaggagggcgtggggccagatccctccccgttggctgggctttgacctccagactcccggtccgcagctgcagagtctgctggacacgcgctgcgtgtacattctggactgttggtccgacgtgttcatctggctcggccgcaagtccccgcgcctggtgcgcgctgccgccctcaagctgggtcaggagctgtgcgggatgctgcaccggccacgccatgccacggtcagccgcagcctcgagggcaccgaggcgcaggtgcgcttgcagcttcggaggcccctccccaggatccttcgcaccctgacatgccctgacccctgtggcttcactacctccctacagagctgggcccaaacccacctcctctttgctgactctgcccaggccccgccccctctgcaagctgcccctcctattcctacctccgtgtccgaggccccgcctcccaagccccgccctagatctcccttgggtcccgcctcaagcctcgggctacttcctccaactctaatcatgccgcacccctcatggttagttgatggcctccctggcaggtgttcaaggccaagttcaagaattgggacgatgtgttgacggtggactacacacgcaatgcggaggccgtgctgcagagcccgggtctctccgggaaggtgaaacgcgacgccgagaagaaagaccagatgaaggctgacctcactgcgcttttcctgccgcggcagccgcccatgtcgctggccgaggtgggggcagggccgggaccggggcgcgggggggggggtggggggcaggccgagggcggggcctatgcgcagagcgcgctcagacctgccgcggggcgggtccctctcacctgcaggcggagcagctgatggaggagtggaacgaagacctagacggcatggagggtttcgtgctggagggcaagaagtttgcgcggctgccggaagaggagtttggccacttctacacgcaggactgctacgtcttcctctgcaggtaccacctcagcactcccttccccaagtccctcccctggtgctgggggctcgagcccctgctcacaaccttccaacccggcaggtactgggtgcctgtggagtacgaggaggaggaaaagaaggaagacaaggaggagaaggccgagggcaaagaaggcgaggaagcaaccgctgaggcagaggagaagcagccagaggaggacttccagtgcatcgtgtacttctggcagggccgtgaagcctccaatatgggctggctcaccttcaccttcagcctgcaaaagaagttcgagagcctcttccctgggaagctggaggtgtgcctggcagccccgcgagcccgaggccaggcggaggggtgtggtggggctcagacccagcgaaggttaggctcccgaggggcaggtgggggtccagggagctgcccctaacacttccacatccccaggtggtacgcatgacgcagcagcaggagaaccccaagttcctgtcccatttcaagaggaagttcatcatccaccggggcaagaggaaggcggtccagggcgcccaacagcccagcctctaccagatccgcaccaacggcagcgccctctgcacccggtgcctggctgggggaggacgcagtggcgagcaagcgtcagggagccaggcctgaatccttgctgatgccccatcccttccacaggtgcatccagatcaacaccgactccagcctcctcaactccgagttctgcttcatcctcaaggtggggttgtgggtgtgagccaggactccgtggaccaaggggtggggtgtttgggggctgagtcagctgcgaacacccccacccctgcacactccccaggttccctttgagagtgaggacaaccagggcatcgtgtatgcctgggtgggccgggcatcagaccctgacgaagccaagttggcagaagacatcctgaacaccatgtttgacacctcctacagcaagcaggtcaggaggcgggcgggcaggcgggcacacacagaggagccagggcaggcaggggccctgggctggactggcctttcccgcaggttatcaacgaaggtgaggagcctgagaacttcttctgggtgggcattggggcacagaagccctatgatgacgatgccgagtacatgaaacacacacgtctcttccggtgaggccagggccctgaccctcccctcagtcctggcactgctgcttatgacctctggcctcaccttgacccttgattcccaggtgctccaacgagaagggctactttgcagtgactgagaaatgctccgacttttgccaagatgacctggcagatgatgacatcatgttgctagacaatggccaagaggtgtgatgttgccactagccctgcccatccaaggaggcgcccatagacttacttacaaatgggaattctcgggccaggagcaaggggctgttcccaggcacccatgcaaccgtatctcccctgctgcccccacaggtctacatgtgggtggggacccagactagccaggtggagatcaagctgagcctgaaggcctgccaggtaatctgggtggagggagggccgaggtgggcctgtgggcagggcagggtcatcacccaaggctcgctgtccccttgccaggtatatatccagcacatgcggtccaaggaacatgagcggccgcgccggctgcgcctggtccgcaagggcaatgagcagcacgcctttacccgctgcttccacgcctggagcgccttctgcaaggccctggcctaagacaggctggcacagccccaggcttggtgaggaagaggaaggggcctcatccactgtctgctagcaaagaatgtactcaggtgacaccacctgctccagccacgtccagtgccacagtccccagtagcctcaagcagcaccaatggggatgaccctgacaggtgccctcaggggtctgggaaatccaactctctccacagtgtgagtgcacgtgtgaagccccctcactcttccgctagggataaagcagatgtggatgccctttaagagatattaaatgcttttattttcaatattaaaaatcagtatttttaatattaaaatggcgctaatttt

SEQ ID NO: 334 - DNA, 1668 bp, Homo sapiens
atggcagcccgtctgctcctcctgggcatccttctcctgctgctgcccctgcccgtccctgccccgtgccacacagccgcacgctcagagtgcaagcgcagccacaagttcgtgcctggtgcatggctggccggggagggtgtggacgtgaccagcctccgccgctcgggctccttcccagtggacacacaaaggttcctgcggcccgacggcacctgcaccctctgtgaaaatgccctacaggagggcaccctccagcgcctgcctctggcgctcaccaactggcgggcccagggctctggctgccagcgccatgtaaccagggccaaagtcagctccactgaagctgtggcccgggatgcggctcgtagcatccgcaacgactggaaggtcgggctggacgtgactcctaagcccaccagcaatgtgcatgtgtctgtggccggctcacactcacaggcagccaactttgcagcccagaagacccaccaggaccagtacagcttcagcactgacacggtggagtgccgcttctacagtttccatgtggtacacactcccccgctgcaccctgacttcaagagggccctcggggacctgccccaccacttcaacgcctccacccagcccgcctacctcaggcttatctccaactacggcacccacttcatccgggctgtggagctgggtggccgcatatcggccctcactgccctgcgcacctgcgagctggccctggaagggctcacggacaacgaggtggaggactgcctgactgtcgaggcccaggtcaacataggcatccacggcagcatctctgccgaagccaaggcctgtgaggagaagaagaagaagcacaagatgacggcctccttccaccaaacctaccgggagcgccattcggaagtggttggcggccatcacacctccattaacgacctgctgttcgggatccaggccgggcccgagcagtactcagcctgggtaaactcgctgcccggcagccctggcctggtggactacaccctggaacccctgcacgtgctgctggacagccaggacccgcggcgggaggcactgaggagggccctgagtcagtacctgacggacagggctcgctggagggactgcagccggccgtgcccaccagggcggcagaagagcccccgagacccatgccagtgtgtgtgccatggctcagcggtcaccacccaggactgctgccctcggcagaggggcctggcccagctggaggtgaccttcatccaagcatggggcctgtggggggactggttcactgccacggatgcctatgtgaagctcttctttggtggccaggagctgaggacgagcaccgtgtgggacaataacaaccccatctggtcagtgcggctggattttggggatgtgctcctggccacaggggggcccctgaggttgcaggtctgggatcaggactctggcagggacgatgacctccttggcacctgtgatcaggctcccaagtctggttcccatgaggtgagatgcaacctgaatcatggccacctaaaattccgctatcatgccaggtgcttgccccacctgggaggaggcacctgcctggactatgtcccccaaatgcttctgggggagcctccaggaaaccggagtggggccgtgtggtga

SEQ ID NO: 335 - DNA, 547 bp, Homo sapiens
gttgaaagctcctggcgcggcggggcggactccacccctgcccggcagcccagcgcctccggccgcacttccagctctctgcgcagcccgccgcgcagcccgccgccccagccatgggcgaaccgctgacagaccaggagaagcggcggcagatcagcatccgcggcatcgtgggcgtggagaacgtggcagagctgaagaagagtttcaaccggcacctgcacttcacgctggtcaaggaccgcaacgtggccaccacccgcgactactacttcgcgctggcgcacacggtgcgggaccacctggtggggcgctggatccgcacgcagcagcactactacgacaagtgccccaaggtaaccgggggcgggacggcgggccggggtccagcccggagtcggagtctccggccgcggccggcgggacgaggtggagaacccctcagagtggtcccttgcacccggtccttgccccgaagtccagaggagacgtgtctaggctgtgggcgggcagcctgggggacagattaggcctcccaacagacgcc

SEQ ID NO: 336 - DNA, 1264 bp, Homo sapiens
tggtttgtggtttttatgaagagatgtgaaaaaggaagtgtggaatgatgggatgagaagttgtatggggaagatgaatagaagaattaggtggttgaataaaattaaaaggtgtgtggttggatgaatgaatgagtgggatgatagatggacctaagtggttagtggatggacaggaggatggatggatgtgagagccccagaaggacataaggaaagatgggtggatagatggatgggcggatggaaggatatttaggaggatgaatgagcatgtgtgtggagagaggtgcccattcacactggcttgaacacatgggttagctgagccaaatgccagccctatgacaggccatcagtagctttccctgagctgttctgccaagaagctaaaattcattcaagccatgtggacttgttattgaggggaaaaagaatgagctctccctctttccacttggaagattcaccaactccccacccctcactccccactgtgggcacggaggcactgcgccacccagggcaagacctcgccctctctccagctcctctcccaggatatccaacatccctgtgaaaccagagatcttgctccagccggattcagagaaatttagcgggaaaggagaggccaaaggctgaacccaatggtgcaaggttttacggttcggtcatcctctgtcctgacgccgcggggccagcgggagaagaaagccagtgcgtctctgggcgcaggggccagtggggctcggaggcacaggcaccccgcgacactccaggttccccgacccacgtccctggcagccccgattatttacagcctcagcagagcacggggcgggggcagaggggcccgcccgggagggctgctacttcttaaaacctctgcgggctgcttagtcacagccccccttgcttgggtgtgtccttcgctcgctccctccctccgtcttaggtcactgttttcaacctcgaataaaaactgcagccaacttccgaggcagcctcattgcccagcggaccccagcctctgccaggttcggtccgccatcctcgtcccgtcctccgccggcccctgccccgcgcccagggatcctccagctcctttcgcccgcgccctccgttcgctccggacaccatggacaagttttggtggcacgcagcctggggactctgcctcgtgccgctgagcctggcgcagatcggtgagtgcccgccgcaggctgggcagcaagatgggtgcggggtgctcagcgcggac

SEQ ID NO: 337 - DNA, 1463 bp, Homo sapiens
cgccactgcactccagcctgggcaacaagggcgagattccgtctcaaaaaaaaaaaaagtcttttcaggtttttgcatttctgacaaccggatggccccacctggacctgccaaccagttgtgtggcctctacccagggactgactcagcataagcggacagcttcgactccctgtgatttcatccctagctgaccagtcagcacttctgactcactggccccctacccaccaaattattcttaaatactgggatccccgagttttggggagactgatttgaggaataaaactctggtctccggaacaatcggctgtgtgtgaattatgctttctctattgcaattcccctgtcttgacaatagactctgtcccggcagctggcaaggcgaacccatggggcggttacagtgtctgcaacgcagacacaagcgacagagacttgatcagaatatacaaggaactctgcaagtcagcgatggtaagaagcagggcagctgggctcctacgcctgcctcgccgttcggtcccccggacacctctgggcttaggactcaggggaacagattcccagaagcaggttccccgccgcgtccggcgcccgggctctgcagccgcccccggctttgcctcctgcacccgcagggcgtcccccgccgctccctcccatgcttccctgcagcggcccccgaccccagtcctggccccaccatggatcctgcatcgccgggttcggccttggcgggttcagccccgcagagtcggcacccgggccaggtccatctccttccagccctcccggtgcgtcccgcggggcaggaaggaggcgaggcccagccgccccgtgtcgtgcaggtgttttcccgggcccgtccgcggcggctgctgaggacctggggagacccagcctgtaggatccgcagctgcggtgcgcggccggcagtggcgctcgggcttcgtccccgggggcggggcttcgtccaggcgcgcagggaccagcgggcctcgccctcccgcgccgctttccgattggcagccgcccgcggggcattgtgggccgtccgcgcgcccgtcccgtcgccgccgccgccgccgcagacccctcggtcttgctatgtcgagctcacccgtgaagcgtcagaggatggagtccgcgctggaccagctcaagcagttcaccaccgtggtggccgacacgggcgacttccacggtgaggacggcgcggagcccgggcgcggcgcaagcgccctccagaggccccggcgccccgatttccccgggtctcccgttccgggacgcggaccgggtggcggtgccccgggcggctcgttccgggaggaatgagcgcaggtgccggatgttggggccagggacagccgtgaggggagcggggcccgggtcggccgtgagaggcgcagggccagcggcgaccgtgaggggaacggggcccgggtcggccgtga

SEQ ID NO: 338 - DNA, 198285 bp, Homo sapiens
gatcaggctctttctctctgtaaacctgctcccatggcattcttttctgcttcaattcagtccatccctgaccacccacccagccacccatgctggaaatctgagatatctttgactcctccaccttcccactcccacagctaatcagtagccaaaccctttagattctacttcctaattatcttgatattctatctcctctgcctcctctaattatgacttaattcaggctcttattatctgtcatttaaattattgctgtattgctacaggagtggtgtgtatatgtgcaactgttcatcttggtatgctatagactcttgcccagcagttttgcctcaattctttaaaagctccagttcattgtttgaaatatcaatcagaacattttttccaaaatgctaaaatgattgtcattccccagttttaatatctctatcatctgctaagtaaaagcaagctcctccttgtggcgtagcagggcccacgtgatctggcccttgcccgaatttgtagcttatcacaacatccttctaccccccattacctcctattatacaggaacacccaagcgaccttcacaacattcatatcaactagtacacagggtctccaaagaggacctctggatgcctgtgatctttgtacttctgcctaccctttgccctggcgtgtttttctcttccttcatgttctgctggccaaattgtttttccttcaagtcttaggagcctgcctgattatgttcctcctattccgcatcctcataaaattactgcgacttccaaaacacttggcacattcttatttgaatacattacattgttgtgtaattatcccttggccccctcccccagcactagactctaagctctttgaaggcagactatgcctattcatctttgtatttctagccctgggcccaacacccagaatttcttgtattttcaatatatgtctgccaaatgaattagagctaatgcctgaaggagaataagtttttttgagaaagaggaagagccaggagggaggagaaggcagggtccgaagagccctgggggtttacttggggaagatgcggttccccattgcagcattctgccaggaggtggcactgctctgaagagccagctggtcgcttacagactgaggctgacagcttgaaaccaaagagggaactccaccaggaagcaacattcctccactgggcttcccagcccagttacatgccatactctgccctggtcaaacagccaagtcttcaggaggttactggccccaggcgtctccccagtgactgatgatgttaaaccctacgcttctctgattggtttagacaaaatgacaagggcacctattggaaatgatctggcaaaacatgatctaaggccaccctctcggggagggagttggggaagctgggttggctgggttggtagctcctacctactgtgtggcaagaaggtatgggtcatgaacagaaccaaggagctgcgctgctacagatgttaccacttctgtggctgctaccccactcctgggccgtccctgaaggtaagatggtactcctatttacttccatcctgaacctagggagcccactcagctttgtgaggaaaagcgctgtgctttgtgagtggtgggaagtcttatgaggcagtggaaacaacaggggagtggggaaagacagctgctatgtgtggttggtaaacgatatcagtgatgctttgcatgttccatttaagacaatctcttgaagcggagattgttctctccattttacaaatgaagaaaatgagactcagagttatttgtgcaagttcacaccattggaaagtggtagagctgggatttgaacaaagtgaatgttattttcactcctccactcaagattctactctgctttctatcattaacttatcttgtgattcttgaaaagtgtcttagtttccttctctgtagaggatggggcagaatggaagaataatctggaagatccctcttcctccaaatgtctgtttttctgggtattgggttaaaggtttcctgctggctgagcgattcctgccaagagcttcaaagaagagggattattttatgcagttatggggtcacttctcccattgctgtctttgggaggcctggtaggttaaggaacagaagacattttgagagacgcttggtgccaatgaagtggctgaagaaatgtctggatacaggttttccaatttaccatttgtgtctggggatagtgggaggcagtcccatctatggcttggggaggctgtagccattcctcctctttcccttctaagagtgagaaacccatccatggccttctctagtcaatacagtggcctggtatgaattagacaaaggaatcccctttgggaggatacagccctatgccaggatgtatggcatggtgagcagaatgcaggctttcacttgcttctttggctaggtgtctttgtgcagcccccaaacacacaatgaacagtgactctgaatctgtcactttattttatatatatacatttttaaattttttatttgatttaatttattttttttgacacggcatctcgctctgtcacccaggctagagtgcagtgacgtgatctcggctccctgcaacccctgcctctggggttcaagagactctcctgcctcagcctcccaagtagctgggattacaggcgcatgccaccacacccagctgatttttgtatttttagtagagatggggtttcattatgtttgccaggctggtctcaaactcctgacctcaggtgatccacccgccttggcctcccaaagtgctgggattacaagcttgagccaccgcgcccggcctttatatatatattttttgagacgggctcattctgtcacctgggctggagtccagtggcacaatcatggctcactgcagccccaacttcctaggcacaagcaatcctcctgcctcagcctccagagtagctgagaccacaggtgtttgccaccacacctggctaagtttttgtattttttgtagagacggtctcgctgtgttgcccaggttggtcttgaactcctgggctcaagcaatctgcctgcctcagcctcccaaagtgctgggattacaggcatgagccaccatgcctggcctgaatctgtcactttagaaagtagaactctttacttttgccaactggcctttttataggcaggggaagcttggagagatgccataatttgttcttcaccccctttgggagggggagtctaaataacagacacaggaaagggtctcacctcagcccacgctccttaagcaggccttgcttgtttttgttgttttgttttgagacagagtctcactctgtcacccaggctggagtgcagtggcttaatcttagctcccggcaacctctgcctccctggttcaagcaattctcctccctcagcctcccgagtagctacaggcgcatgccaacatgcccagctacttttttgtatttttagtagagatggagtttcaccatgctggccaggctggtctcaaactcctgacctcatgatccacccaccttggcctcccaaagtgctgggattacaggcatgagccactgcgcctagccccaccttgctgttttttaagttggaggagaaggctcccacctccctgaacctcaccctgtgtcctttgcagctcctactccaatgtggccagatgacctgcaaaaccacacattcctgcacacagtgtactgccaggatgggagtcccagtgtgggactctctgaggcctacgacgaggaccagcttttcttcttcgacttttcccagaacactcgggtgcctcgcctgcccgaatttgctgactgggctcaggaacagggagatgctcctgccattttatttgacaaagagttctgcgagtggatgatccagcaaatagggccaaaacttgatgggaaaatcccggtgtccagaggtcaggagttttctggggagtgaagggaggagggctgcattaacctcattgatctgtacactgaataattccccttgataccagctccccatctcaaatactttctggttctcttcatcaccttaatttttccaccagccttggtctgcaccctgtgttcttttggtgggccgaagtacctagcatgtagtaggcattcagaactatgtattgaatgtgatgaattcaacaggtaccaactgatacctactgaatattaacacttgtgctactatgcccagcaagatggatgggaagagtggaaatatctgatgacgtgactatgtcttagtgagaagacagtgcatggttagacatcaatgtgagctctagacaggaagtgctgaaggaagtcatggtggaggggtccagagtagcctggatctggctctgcttctacgtctagctgcagtccttgcctggaagaagacctcccttcagagcccagctcctcgctcatctctgtctcccaaagcctgacccactgtgttcttctctgccctcccctccatatgccatggcccctccaaacacagagataccatctaaactagtctctttttccccctacacttcaatccccccaccagggtttcctatcgctgaagtgttcacgctgaagcccctggagtttggcaagcccaacactttggtctgttttgtcagtaatctcttcccacccatgctgacagtgaactggcagcatcattccgtccctgtggaaggatttgggcctacttttgtctcagctgtcgatggactcagcttccaggccttttcttacttaaacttcacaccagaaccttctgacattttctcctgcattgtgactcacgaaattgaccgctacacagcaattgcctattggggtgaggctttctccctggaattctggtccttttgggggcaaaaagggatagatccatgggaggaggcttctttctccactggtaccttgtttagtccattcctaccctaagcccatcccagtctcccatgtcatcccagacacccacgtcatttccctgggtgggaggctccctaactaggtccccaggctgagccactcatttcctccagtaccccggaacgcactgccctcagatctgctggagaatgtgctgtgtggcgtggcctttggcctgggtgtgctgggcatcatcgtgggcattgttctcatcatctacttccggaagccttgctcaggtggtatgtcatctggagggggcgggtgagcctgtgggagccagatacagtggtgcatgcgtgcatgtgtcaggattattttgtggcatggggggacatatagcgatcctcaggcccttgggtgtgggggcctgtatccagcaccatgggggcacatcttcccagttggggacccagttacacacacacagttatgggtcacaagaattgctttgagtgaaaaaaggaatcatggggtgctgtaggaagggtgcttggagatgatttgggaacaaggagagatcaacttctgcagggtgtggtgcaggcagggcgagcaaggcctttgtgggggaggaggaggaggagaaggaggaggaggatggatcccctgatgcctttcctccatccctgtctctcccccagactgattcttccagaccagagtttgatgccagcagcttcggccatccaaacagaggatgctcagatttctcacatcctgcccaggatctcctcttagggtagaagaagtctctgggacatccctggggtgtgtgtgtagatttcccacctggggactctgctgtccctgggcttgcatcccagggatcccagagtggcctgcctatcacaaccacatcccttccccccacaaggcaataaatctcatttctttatatcagtgtggcttctttcttaactcatggtatttgtttctggatatctcaacttgagtgggttgtcgtttcaaattcagcatgccttaacctgaacacagcttgacctcgttagggagggaaatagggaaaacccctaatttgccagctgagctcttattccctggtcttggcggtacatgatgtttttccatctatcggtttgtgcaaaatatgtgagaaacgaaggcagagttattttctaataatctgcttacaaaatggttaaggaagctgcttgtgtgttttgtgcgtgtgtgtgtgtgttgtgtattttactgtttgtgaaaatgtttatgtctcgtataggctgccctgaggaacatataactcccttcaaccctcaccgtaactgagaaacagaagctcagggatgggaagaataagctcccaagtgctataccaatcagttatgtcagttctgggaaaacagtatcatgaagcccctaacatgaagtgaaaacagcctggaagggcaaagaattcacatgtctttcctgacaatctgttccttggcctgagtgaactgtccaaggagaactgcacaggtgctgtcctgggaagataacgaaaggtggcagcacatgaccactggtggtaaattgctttgcatatgctttctttcttgcattccttagggtctgggagttgctttggatgacagggtggcaataaagttgagagggcaattatttggtgagggagtttctgttcttggcattgtactagagtctaatctaaaagaaaatattaaattctccctaagagaagttgcactgtctctgaaccatctcatttctaacagcatcatgtgtaccggttaagaagcatgggctctggaacctgactgctggggattcaatcgtaactgtcagcgtttagctgtgagcccttgggcaagttacttaacttgtgctttggtgtcattttctgtaaaaggatgatgataacaatggtgtcccccttaccactctacacccaccatgttgccaacatttgaaagtcaaataagtattagcgaggataaaggaaaatgtgaactgtaatatcttggtctgttggtgggaatgtaaactgtttatgatgcccgaattacagaaattatgaactagttgagtgaaaaagttaatataggaaataaggcagcatatcctcatgctgtgaagcttaaataagttaatacctacagaatgcttaaaatagtgtttggcacatagaaaatgtgctgaataaccctaacccttatcattattggtcttgatcttcagaggagaacttagttgcctcgtagacttctttctcttttctgaaaatatacctcaatactagcttcaagtattgtattttctccattttagatgtttttctttttattctcatgttagtaattctagatgtggtgctttctagttcttcctaatttctctgtctctctgttttccaacttatctagatatttcctgtcaggcaagacttaaaagtgctttattatgctgtgtgactttagacaagtcacttcccctctctgggcctcaaagtcttcatctgtaaaatgatgggcttagattagatgctctctgatgaaaccttctatgatactgttacttaagtactctagaagcactcaggtatcctctctagtctggtgccccttttctaatatactatattacgcactattcccagcaggaatgctattcttgtttaaatcttttttcctcactcttccttgaggtattatatctgattttggtttagggcatttgcccaggctctttcctctcatacgggagctttctctattctgctcatcttgttcctgtcttaacccactccataggtccaactccagttcaacttattccatgaacctgcccctaatttctctttattgaaatcttccaagacttaaagcactcaacctaaggattgggatatgccgctttatttcctatgttaattttttcgcccaactagtttataatttctataattcagggatcataaacagtttacactcccatcaacaaagcaagatagttcacatttccctttatgctcactaatgcttgtaattatttgactttcaaatgttggcaacatggtgggtgtagagtggtattttgttgttttaatttgcttttctctcattactaatcagtatcatattgtttgattattttggctttttaatatgtgttactattaagaagaacaagtctccattccttcaccaccttcccaaaaaatttattttccttttctttatcaaaatatcctaaaatactcttggactttatttccttgtacattcataatcagttgttaaattctcctgaaacctactgttactttaatttggggtagcatttaggttagagatgtggggagaggttgtcattatgttagcatggcctatccatgaatatggtatatctctacacctctcaggtctttgtgcacttcaataaagttttcttttttcttaaaattcttatatttgatatgttaattcataaatatgctatggtttttattgttattataaatagtaggcaattttcagttattttccaattgattattggcaatacaggatttaaagtaataaatcctgagttcaagtaatggttttattacttagtatctgggtaaatctgggcaaccacttaacctccctctgcctccattttctcgtgggtaagatgaagatagcattcttcaatagttgtggtggcaaaaaataaaattaaaaaaggaaaaatagttgtggcaaatcagatagactatccctagtagttcaaataatttgactgtaggttggaaggatggtgaactgactacagaaactataatccaaaggtcagggtctagagcagtgaatcctgacagggtaggagggtgtgtgtgtgggcggaggtgaggtaaggggtagatggcaggggtggggtggggattggacagattgggcaagtaatataatcttggcaggatgtaggtgtgtgtagttttgaaaagacactgaagtcacgaatgtggtcttatgctatgaggcgtgattaactggttgagcaattttgtgtttataaaatggagacttcagttaaaaccgtctgccccaagaacctgcgaactgacatggagcaactttaggaagtgcctagaagagatttattattatggccatactctcagaaaaaaacaagaaatcacatttgtgacttcctccaacgtgcagtgccagtgacgttattgtagcttgtctttgttttagctaacccaggctctcgtaggacacctcctccctgatggcacctcacagcattgtcaagcttgtggagctatacaccagacctacaatgccaactgccttcctcctctccaacacaaatccagcccagtattcaaggctcattccaggccctctcgactgagagtactccctgtctaccatgtccatggtgatttctctcttctcttttaagaccactggccttattgcttacttactttaatataaactatttaaagtgtttgttctcactccccaattgacgtacaagcaaagcgatatgggggcagaatccatatcttctcactctgtattttcccagtaatgctttgcacacaaaccctgggactagtttactgcaggcatgtggtggtcaggctaagggcagaggcaatgggaaaggagaggactcactctttgggtggttgtgtagaggcaataaaagaaaggcaacatgtgggaacctggttggggctccatacctcttcggtcccggtgctatatcaataattaacaaataagtaacaatggacagagcaactgaaatgttattttgaattggctagaggtggaaagacagagctatatctgtaaaaatggaagggttgggaggaggagaggaaggaaaacactgctgagcacaggtgtctgggttttctgtccttctttattctaaaaagctccctcagtgtttgaattaatagagaagtgaaatcctctcctaccatttcctgttgtggcctcacagaaggtttcacatctcctttgactgccggagcagagatctagacataagagggaactacattcagccccactgttactggctagggccatgttcagtgctggcacaggaccacacagccagtgctcccttgccagggctaggctttgtagacattgaaaaggatcccaggacttggttcctataaggttaggctaacagcttacctgggcaggatggggaggaatgtgagggggaaatgtattgggggggtgtgggggaaaattcagttttgaaacttgtcaaaagagaaagtggaagggacggtggttctcagagcagaaggaactctgaggacaggaaagataagacttgggtgaattgggttatggattgtgactcttctctttctctctttctcagcggaggcctcactaactccctttatttgagccatcccagttccaagatgtagtgagtgtgtgggcatgctcaagagagtgtgtatgtgtgtgtgtgtgtacacacgtgcatgtgtaacagctgtataagaagaggagttacagcctttagaccttgggtgtgaatctttggacctgttttccaacctgggaaatgaggacaattaacaagttttttttttttttttttttttttgagacagtctcattctgtcacccaggctggagtgcagtggcacgatctcggctcactgcaacctccacctcccaggttcaatcgattctcctgcctcagcctccagagtagctgggattacaggcacgcgccaccacacccagctaatttttgtattttttgtagagacggggtttcaccatgtttgccaggctggtctcaaactcctgacctcaggtgatatgccttcctcagcctcccaaagtgctgggattacaagcgtgagccaccatgcccggccaacaagtcttttaagatgagatgagatattatagaaaggacctacctagcactgtatctgtagaagctctacagattatgcactccccaccccatattctgcccattccaacacacttgacagttcgttagcagagttagagtatataagcaaggtgagtgggggcagtggctgggagctatggcagagcttcagttaatctcaattagttacacaacgaatctttcgtttttggtaataatctttgtatgcattttttatccccattttcttcataggtgttagattttcctgagatcagggactttgagggagggcaggtaagtgtggtgtcaaggggccccttccacaatcctgttttgtttagctcactatttaataaaatccaagagttctcagaaactaagatgtgaagaggcagccctgaaacctactggggagcagaaggaagccaatttagagtttcaagttagtgatggaaaatccatcaactgtatagttcacaatgggatagaagaatgaattgccgtttaaaatctgctttttcaggccaggcacgatggctcatgcctgtaatcctagcactttaggaggctgaggtgggtggatcacttgaggtcaggagttcaagaacagcctggccaacatgatgaaaccctgtctctaccaaaaaaaaaaaaaagacaaaaactaaccaggagtggtggcacatgactgtaaccccagctactcaagtggctgaggcatgagagtcatttgaacccaggaggcgaagattgcagtgagccgagattatcccactgtactccagcctaggcgacagagtgagactttcaaaaaaaaaacctgtgaaaaaaataaatacgcaaatacataaaatctgccttttcaagacacacacgtgaccaagaagcatatgaaacaatgttcaacattactaatgattagaaaaatgcaaatcaaaatcataatgagataccgtctcacaccagtcagaatggctattattaaaaagtcaaaaaataacaaatgttggagaggttgcagagaaaacggaaggcttatacactgctggtgggaacataaattagttcagccattgaggaaagcagtttggcaatttctcaagaaccttaaaacagagctaccattcgtcccaggaatcccattattaggcatatacccaaaggagtatacattgttctaccataaggacatatgcacatgaatgctcactgcagcagtattcataatagcaaagacatggaatcagcctaaatgcccaccaacagtagactgtataaagaaaatgtggtacatatacaccatggaatactccacagctagaaaggtcgtgctcacgtcttttgcagcatcatggagctgggggctgttatcctaggcaaacctacacaggagcaggaaatgaatactgcatgtctcactttatagtggagctaacatgagacacatggacacaaaaaggaataatagacactgggccctacttgagggtggaggatgggaggagaagaggatcaaaacactacctatcagatactatacttattacctgggtgatgaaataaatttttacgccaaatcccgatgacacacaatttacctatataacaaacctgcatgtgtacccttgaacctaaaacaaaggttaaaataatttaaaataaataaaaaataaaatcttacttggtattctcaaaaaataaaaaacaaaatctgtcttttcaggggaagaaaagtaggaaagctttatctcattttcctagtggcttcataatgcagggacctgcccccagggaacagggtatagtaggggaaacacacaggggtgtttagagtttggcgaaaggcaggtgagctctgggcactgacccgtcaccagctatttttcaaggagtctgagaggtgttaacctgcggtctaccccgtgagattgctcagagtgtaggaggatatggtttactagctccggaaagcagctattataactgaggaggaaatgaagcttgactggctagaacagaagcaacaatggaggcccatggagggattttccaggcccctattcctgatctccatggtggcgctgcttcccttattctgcagtcttgctttgagaccagacaattctgtactctgtctgtgccttcttccttctcagcagccctgcctctgccacctgccccagaagggctctgggtcctctcatctcaggacagacaagggtttttgtaattatcttcttgggtaacctccctgtaaggaataggagaggttatctggtcctggtcttttgggagagcattgagaagaaaaagttaaaccagtgggcagcccaggctgcatacatcctgggaatattgcgattattctctccagtaatctacggaaatctactggttgttctgcagaaaaagaattaagagagacaaggagacctgttgtctaagactaaggcaggatgacgtttacctagtaactgatgatgctaggctgaggcactcagtgatttgtctctacatttgtccctgcctacctagccaatctgtccctgtttgggacactggactcccgtgagctggaaggaacagatttaatatctaggggctgggtatccccacatcactcatttggggggtcaagggacccgggcaatatagtattctgctcagtgtctggagatcatctacccaggctggggcttctgggacaggcgaggacccacggaccctggaagagctggtccaggggactgaactcccggcatctttacagagcagagcatgatcacattcctgccgctgctgctggggctcagcctgggctgcacaggagcaggtaaggacacttcttctggggactctcccttcccctgctcctgtttcagggtaagggtgttccgttttgtaattgcatttgacaccccagatagtttgtctccctggtatacattcctatagcactttgtactttgtagcaattttaatgtaattaatctgtataattatctgtgcagtgtatattccctgctggaatataggcaaggacaatgttcatcttatttattgctgcctcctcagctcctagcacagtgccttgcatgcagcaagtgcttcataaatatgtgcgaagtgaatatttaatatttccagcacaatacaaggctgactctttctcttgaccctttttctctctcaataatttgccttactgaaggtctgtgttctgggcaaattgtcatgtttaaacatgcaaataatctcggggggctactcctatccctgtgcttagtcttgcataaagaggagactggatctaaaaacttatctactacttctactgactccctcaaatcagactttcagaaacttcagtgtatgagcttggtcagtagatgttccctgagcaggaaatctgtgccagactagctggatgtcaccaaggcttaggttctgagctgaatataggaaaaatcaactttttttcttctatatgctcacactcaacacttctttgaccaactgtgtgaggttttttttttttttttactcataccaaccaattctcctatattagctggatatcctataattcaattccattgtgacattaactagagttaacatagacaccaaaggttaaagactcagtcccataagactgcctccatttcagacaccaatcacaagtagtaggttcccaaattacccacatcttctgtccaacttgcctacaaatcagaggttcccatgaccccctccttggggttggtaatttgctaaagtggcttatggaactcaggaaaagtttacttattattgtagattttttacaaaggatattttaattgataataataattataaatattcatggggtggataatgatgttttagtacatgtaatgtacagtgatcagatcagatcatcatctcatttatcatttctttgtgttggaaacattccatatccttcttctagcgatttgaaatgatataaagtattattgttaatgacagtcatcccacagtggtatagaacactagatcataattttgcatcctttaacaaaggatattttaaagcatacaaaggaacatccagatgaagagataccagatctggaagggtcccaatcacaggagctctgtccccacagaattggggtacttcacctcctggcatgtggatgtgtttaccaactgagaagttctctgaactccatagttccgggatttttatggaggcttcatcatgtaggcatgactgattattaactcaatctccagccccttccccttcagggagtatgggggatgggactaaaagttccagacttctaatcatgacttggtctttctggtgaccagcccctcctgcaggagcccaccaagagtacctcattagaacaaaagacactcctgttatctaggaaattctaagcgattaggcactctatgtcaggaaccagggtcaaagacaaagctctgtgcagagctcctaaatatacgtctgtatgttttatatatttattatttgtgtatatttattatttatatatttatttatttattgccaggccagtagaagacattgacctgttctcccttccctggctcctctaggtggcttcgtggcccatgtggaaagcacctgtctgttggatgatgctgggactccaaaggatttcacatactgcatctccttcaacaaggatctgctgacctgctgggatccagaggagaataagatggccccttgcgaatttggggtgctgaatagcttggcgaatgtcctctcacagcacctcaaccaaaaagacaccctgatgcagcgcttgcgcaatgggcttcagaattgtgccacacacacccagcccttctggggatcactgaccaacaggacacgtgaggagagaggggtgcagaggggctaccaggaagtgcagttaggagggcaggccagggaggatcccacagtggcccaggggtttgagatttgagcagcaaataagagaaaatgtgtggatctgaaatgtagaaagacggaggattgaacctcaaggggaacaaggtggctgacgtgagtggaacaggagtaaagaaggggaggtgaggcttgaaccgcgaggtgccatgtggggagcttatgcagaggctggggcatctcaggatgcatacccaagatgttcttgccttgttatcccagattttgatgttccagatctgatgtgggcccaggcatgggaatatttggaatcccaggggattctgacacatgctttttctcacccttaaactcttgcattgacaatggcttgaagtttgtgaaagtaaacttgaagatctccacagtacagaacagtgtgtctcaagggtggtttctgaaccacctttctcagaattgcctggaggaggtgcttgttaaagatgcaagccccttagtaccactccagatctgttgaaagaaagtatctggggatacagcctaggaaatctgcattttaacataattccttggatttttatttaagattgtgtttgaaaaatgtcaagatagaggcaagcaagaggatcacctaggagagtaaattagtaaaagatggcagtattagcaatctctttagtttgactacattcattccaaatttaagagtgagtcctaagttaggcttgtttccttgaactatgtgaggagaaaaagctttaactagcaaaagaacgtattaaacaagatttggagaaaaattccttttccaccttaaaaaaacccaatgtacaactctggattactcttagcttccttatttcaaatactttccagtttatgtacttgaaataaatacaacaacttctagaacagcttgcagttcagatctggcttttactaattgtaatcaaacataattctggaggaggaaagaaagaaaggggcaatgaaggaatgggagagaagaaagagtaatgcaggaatacattctaacggttccccttcaaggggcagcatggcagagggggctggggtggaaagtgggttgcaaaatctacgaagagttgcgatagggaagaaaccaggttgaggaagcagccagaatgtcaccctccttcctaaacatgtttttttctcctatgcagggccaccatctgtgcaagtagccaaaaccactccttttaacacgagggagcctgtgatgctggcctgctatgtgtggggcttctatccagcagaagtgactatcacgtggaggaagaacgggaagcttgtcatgcctcacagcagtgcgcacaagactgcccagcccaatggagactggacataccagaccctctcccatttagccttaaccccctcttacggggacacttacacctgtgtggtagagcacattggggctcctgagcccatccttcgggactggagtaagtgtatggcagatggatggaattagggtcaaagcagagaaaatgagatgtggatcgatacatggtacatggtagacagcgaagtgctgaaaatggggactgagtctggaggaacttacggggggcttaggaccagaatggggaaatgggataaagaaatggaaatatttaggttggtgcaaaagtaattgcagtttttgccattactttcagtggcaaaaaccgcaattacttttgcaccagtttaatatttagtctgtgctattgctgctctggtggtgtggttgatgttgctgcgtctatgtttgagggtgagaggggagcgtgcttgctttgaaatgaggatgtaaatttggcaatcatattttcagaaccccaaattgtaatacactattctagcctccttagatttcaactattctggtgccagaagcagatgggagctgaaggaatgatgaaggttgaagaaggggggcttttcttggtgtggggcagtactgcatttggcctgctctaccaagcatacgggagtagtaaagccacggctggcagaccatttggcatgcatgctcaggggccagtggataaagaattacttacagttcaaacactgtttgaactcagtgtcgggagtagttaaaggtatcgtgagaagttgcacacagctttggggactcttggaaaagaaagaggaagaaatgaggaagaggaagggtgtctacaaagggccagagaacaggatctcagatcagctgctgtaaccaggtttccccttgtgggaagtgttgtttcttgctgggcagttgggaagggaatggagaacagagaagagagtggaaatcacatgctcacttgaactttcctggggaacgtctcctcacagcgtgcacaagagcctccctttagaaatggagtgttcattttatcatgggaaaagaatctgagtgggacatgattcagaacaggaccggcccaaggaagtgcaggggctgtggagtgggatggagacaagctctgaaaggacacatgggagatctagatgtagaaggtacacaagtagtaggataactcacaggatggatccactggaggttaagacatgtggtaagacagtgtaataggaagctgctcagttggagaaagtaaggaagcaaacattgttaccgtgggggcaatggagaggacagtgaggagccctttatcctgataagggtggctttgaggtaaaggaaggaaagaggatgccttgagaggccccactgtattagagaggacctggaagccaggatgctaattctggggagatggattccccaggcttactctaggagtagaggtccatgggacgagggtttgatttgagaaagatcattttcttgggagtgggtggtgtgagctagacccttggagctgggataaaggaccttttaacccactgagaggtggctgcaataaatggaattgccctgggggtgagcaacagaaactgggtcaagtaagtttctattttttgcagcacctgggctgtcccccatgcagaccctgaaggtttctgtgtctgcagtgactctgggcctgggcctcatcatcttctctcttggtgtgatcagctggcggagagctggccactctagtgagtgactcgctgaactcccatccccactcttggtcccactctctgcttactttctgtttgtgattaactctctccttcctactgcatttgctatgaatactgctagatattttcatccacaaagactggtataatcaagtatcttcctctcttaggttacactcctcttcctgggtccaattattcagaaggtaacatctctgttggtctgtttccctacttgccctttggtaggggtgcgggttagaggggtcagtgttgggttcaactaatcttgattattatatgggtgagcttccatgaggatctaggcaagggcatgatttaagctgccattgctaggattaagagcaggaaggagcatcctcctcttctaccaagtgggatgtctgtggagaggaggctgaaggtgcttcctttgtattagttgttggtgccctggagttttcagtatcactgtattaaggcatgggatggttacagtgacaaacgatgggggcaagttgggttgaagcctcattatctcccttttatttattctgtaggatggcacatttcctagaggcagaatcctacaacttccactccaagtgagaaggagattcaaactcaatgatgctaccatgcctctccaacatcttcaaccccctgacattatcttggatcctatggtttctccatccaattctttgaatttcccagtctcccctatgtaaaacttagcaacttgggggacctcattcctgggactatgctgtaaccaaattattgtccaaggctatatttctgggatgaatataatctgaggaagggagttaaagaccctcctggggctctcagtgtgccatagaggacagcaactggtgattgtttcagagaaataaactttggtggaaatattgtttttccatgtcttcttcctggggccctggggaaggaatatgggcaaagcagggactgaggttaattctcttctgcttgagtaggggagaaatcaatgccttcttccattttcccacttagacatgacagaatttggggccgttttctgatttataattcataaggagaaattcaactgtggtgggttggagtcacagagtatgggcaaggaagggaattaacagcttactcacctcatacaggatcttatgaggattaaatgagttcatacttgtaaatggctaagaacaccgccaggcacatagccagcctgcaatagtgacgttagctatattcgattattcaactttctggccaggcattgtaccaggtgctttgatcctcatcacaaccgtaaggcagacccctcatacccctcaggattcaggggacagagcttaactccagattgagttctagacagttatttcttccataccctgaatgcagaagggaacatagcttgagtgattattatgtcttaggcactggtctcagacctttatatttgtagctcattctcttctcacaataaccacacaagggacagattgtttccctctatgttacagacaaaagatgtgaggctcagagacatttaagtgacttgtccaaggtcaaagaacagatttctgtaggatgtttgtctacctgagctggaagtagcagattactttattctgaagaccctcatgctggtgagcacacatctcttcagagccaccgttccattcccttctaccccaagaccaaggagagccctttgggggaatggactccaccctaaggaagagaggatgctggctggtggtttgttgtcccacgaagggcgacacctgctggacacagaaacctagggtgtggaattgtttttggaattagagctagatactagaatatgggtaagaaaaagaaaccaagaaatgagttgatttggaacacctccataatttcttcagaagcatccttggaattagagcatctcttctggaaggggttaacagaagaagtcagtggaaggaacttaatctctacattttaccatttttatgtttcattttcattttttctattcactgtttttgtttttatttttgtttgtttgacaaagcaaattccttttgaaattctagtttagtctaggaatggggggctttgggccttgtctatatctgggcagttttatttattatttttattttatttatttattttttttcgagacagagttttgctcttgttgcccaggctggagtgcaatggcgtgatctcggcttattgcaacttctgcctcccatgttcaagcgattctcctgcctcagcctcccaagtagctgagattacaggcgtgcaccaccatgcctggctaattttgtattttcttagtagggatggggtttcaccatgttggtcaggctggtctcgatctcctgacctcaagtgatccacctgcctcagcctcccaaagtgctgggattacaggcgtgagccaccgcactaggcctatctggacagttttaaaggagaagctgcagatctgaagggtctagttctagtcacagcagtgggaatcaaagtggcaggatcccagagaaaggaagtagagagttagctaatgggacggcttccagttccttttctagagatttccagtgcaggcttttctctgccctaactttgtaggttttttgttttataggaaaggctgtccccttccaggtaaggaatagggaaaagtatatgtaggtctgctaggatccagaaagtcagaatactataggtagaaaggggagttcttacacaggggaatgagtggtacttgaaaggaaggtggaagaagggtgatggtgcaccaattgtaggaggatgaggagaagagaatggatgctgcatgaggagaatggaatgtaaacataatggattgccaaaaaaggagtgcgtgtgtgtgtgtgtgtgtgtgtgcacttgagcacatgtgagagaaagagaggaaaaaaagagaaggagtggaagagagtaagagagagggagcaaaagggtgagaggagagaagtggagtgggagaaagaaggagagggacatagagagagggagggaggggagcgggggaagagagagagagctggactttcgggttatacataatccaagctgcacaaagaattgttttcgcccttcaatgtcttgttgttttaaaagctgaacttggagctagaattggttttaaaggtcatctagtccacctcccctcccatgaaagaactgggcctgtgttaacaagggcacacacagtgcagggagttccttcaacacttggggcagataacaatattttagagaaacgcgttgaccccacatttgagcttcttcttttgaccattaaagacaatgagaataaatctcaaatacaccacgggaggtggtatccttggcattttttttttccctgagggagagcatgttcctaggttccaggttctctttgcctccctacccacgaacacatgcatgtgaaagaaacagacaagattgacatttaatcccaatgtctatttatgaaaattatctttaggccattttctcaagtttttctctttccaaagtaaaattgggcaaatcagatgaaaaacgagggtggagttcaaccccatcctcaaatccttttttttttttggcttgagtgtctgtcattcccaagagccctccaactgccttgaagcaaggcatgggggatttctccgtggtgcttcctgccactacttggccagaccagtctccaggggtttcagagagtggagaggccccaaacctatagagactactcccagatggggggctccttgtttctccagacccttcctcttccatttcatatgaggcttccaagaggcccctggccgtgctggtctggggcagggaataaagaaatggcttttattgtatcagagtctcaacagaaaacagatggcatactcgaaataggacatttcaaggaaagtttatttattagcaaagtatttacaaagaactgggtggaggatagctgttactaccccaaggtccaaagaggccggggacagaaggggttatcaggactcagaaggacagcaagccctgtacagtcaccaccttgccaagggcagtgcccttcagtcaagggacacaacagcttaaggtgaccttgtagggaggaagccaagggattagaaacactgacctcactcccctcttccctctgctcttaggctgatgctggaagcaagaagaagccagggagcatgggagccattcaatgtcatgcaggtcagcacctgaggcagaccccaggtgcagaagtattgagagtgggtccagaaggacagatggaggacaggaagtacattcacaacaagaaggaaaaacgtcaatgttgtggggtggagagagaggtgcaaaatctgggcttcttttggccttggacaatgacaagcgcatagtagcaacagaaactaagtttgtagtttcctactggggagtttgggaggacactcacttctagttctgtcttccccacttgaattttgattgtggttatactgaatttatagaaatttggggttaactgacttgtttttattactaaatcataccatgcaaaaacaggatgttttctcatttattgaaatcattttgtttgctctttattatggtttttaaactttactttttcatagtagtcctgagtatgctcagttaattcttaggcatgttgtagcttttgctgctattgtgattggtatcttattgcaattctacttttgaatcagtaatttctgatgtagaagaatgtatctaatttaaaaaattgtggttaaaaaaataacatttaccgtcttaaccactttgaagtgtacagctcagcagtgttaagtatattcacatttttgtgcaaccaatctccagaactccttttcaccttgcaaaaccagaactctacacccattaaacaacaactcctcatttctctcttcctctagcccctggctactatcactctacattctgtttctatgaatctgactacttcagataccctgtacaagtgcaatcatggagtttttgtcttttggcgattggcttatttcacttagcttaatgtccttaaaattcatacttgttgcagcatgtaagagtgctttcttcctttttaggctgaataataagctactgtatgtatatgccatattttgtttgcccattcatctgtctatggtcatctttgttgcttccacctcttggctatcgagaatagtgctgctatgaatatgggggaaaatatctgcttaagtccctgctttcaattcttttgcatttatacccagaagtggactcttgggtcatatagtagttttactactgattttttgaggaactgccgtactgtttcccatagcagttacacattttacaatcccacgaacattgcatataaaggttctaatgtctctacatcctcaccaacacttatttcttccctccctctctcccttccttccttccttccttctttcctttcctccttcatttgctccctccttcattccctcccttctttcctttttcctttcatttttatagtagccatgctaatgagaattagatgatgctatggttttaatttgcacttctctaataataagtaatgctgagcatcttttcatatgtgtgtttgccacttgtatatcattctcgaggaaaaattgtctgtttgaaagttttgtttgccccctttttaactgtttgtataaacaattattgttgggttttatgagttctttacatattctgaatattaaccctttattggatatatgatattcaaatactgatatatgattttcaaatattagaaattaataatttttgtaagttgatcttatatgggacaaccttgctcgatcctcttattggttttagtggggtttttgttgttgttgttgtcattgttgttattgatattctctctgtctctctctttttccaggtagataatagtatcatctgcgagcattgttttgtgttttccctcttaatccttagtgttttatttttcatgttgcttgactaggatcttcaatgctgtgtcaaacagtagggtgataatgagcattactcttaaaggaaataaacctaaatattctcattaagtataattttgctgtatattgtagattcacatgcagtggtaagaaataataaaaacaatcctgtgtatcctttacccagtttcccttgatggtaacattttgcaaaactatggtacaatatcacaattaggatacatggatacagccacaatacagaacacttctatgatcacaaggattcttcaccttgcccttttctagacacacccacttccctaccatcccataccctccttaatgtctagcaatcactaatctcttatccatttctatgactttgtcacttcaagacaaatttttttttgtcattttaaaacaaatgattaataaatggaaacatatagtatatacacttttgggattgacttttttttctctcaatgtatttctctggagatcatacaaggttgttgcatatatcaataatttattattgcctagttgtattatatggtatgggtatagcacagttagtttagccatctgtccatcacatctgggttgtttccagatttggctgatatgaatataagtttttgtgtggacataagtcttaatgtctctggagcaaatgcccaggagtgtacctgctgaattgtatggtggttgcatttttagttttttaaataaactgtcaaagtgttttccagagtggttgcaccagcaatgtgcgagtgattgttttactgcatcctcacaggcatttggtattgtcactattttttttattttttttgagatggagtcttgcactgttgcccaggctggagtgcagtggtgcgatcttggctcactgcaagctccacctcccgggttcgcgccattctcctgcctcagcctcccaagtagctgggactataggcgcccgccaccacgcccggctaattttttgtatttttagtagagatggggtttcaccatgttagccaggatggtctcaatctcctgtcctcatgatccgcctgcctcagcctcccaaagttctgggattacaggcatgagccactgcgcctggcttattgtcactattttttatttcagccattctaatatgtgtgtagtgagatcttattgtggttttaatttgcgtttccttaatggctaatgatatcgaacatcttttcatgtgcttatttgccatctgtatatccttttaatgaaatgtctcttcatgaatttttcccattttctaattaatttttttcaaactgttgattttttttctttttttttctgagatggagtcttactctgtcactcaggctagagtgcagtggcatgacctcggctcaccccaacctctacctcctgggattacaggcgtgtgccacaacgcccagctaatttttagtatttttagtagagacagagtttcaccatgttggctaggctggtctcaaactcctgacctcaagtcatccactcgcctcagcctcccaaagtgctgggattacaggcatgagccagggggcctggcctgagttttgataagttgttatatattctagatactagtccttttttggatacatgatttgcaaatattttcttccattatgtagcttgccttttcattcctttacaagtctttcacagagcaacagtttttagttttaatcaggtctaatatatccattttttcattttacagatcatgtttttggtgtcaaatctaagaacttgttgcccagatctagattcagaagattttcccctatcttattctaaaagttttatagttttacattttgcatagaagtttgtaatccatattgagtcaatttttgcagaaggtatgagtcttagattaaactgctgctcctccttctcttcctccttgttgtctttctctcctcctatggcccttgaatgttcaattgttccagcaccatttatgtttttccgatgtctgcagggtgtgtagggatattccctgtggacatttctatattctttctttcttctttgtcagtgtagtctgctagaggttcatcagttgactgatcttttcaaagaagcaactttttgtgtctcactctgtggcccaggctggagtgcagtggtgcaatctcacctcactacaacctccgcctcctgggctcaagtgattctcctgcctcaaccttccaggtagctgggactacaagcgcctgccaccacatttggctaattttttgtaattttagtagaagcagagattcaccatgttgggcaggctggtctctaactcctgagctcaagtgatccacctgccttggcctcccaaactattgggattacaggcgtgagccacagtgctcggccttcctttcttctttggatgtattttgatcttctttttctgggctcttgagatgagagtttgaattattaatttgtgtacttttttttttttttaaagagacaaggtctccttatgttgcccaggctggcctcgaactactgggctcaagtgatcctttcctgcctcagcctcccaagtagcacccagtttttcttctttttaatgtatgcatttaatgctataaatttccctttcagcactggtttagctgtgtcctataattttttttattattttgaaaatatttcgtgggttcatggtaggtgtatatgtttatggggtacatgagatgttttgatacacgcctggaatgtgaaataaccaaatcatggagaatggggtagccattccctcaagcatttatcctttgagttacaaacaattcaattacattctttaagtaacttaaaaatatacaattaagttatttttgactatagtcactctattgtgctatcaaatagtaggtcatattcattctttctactttttttgtacccattaaccatccccacctccccgctcagctatccactacttttctcaggctctggtaaccatccttctactcactatgtccattagttcaattgttttgatttttagatcccacaaataaatgagaacatgtcatgtttgtctttctgtacctggcttatttcacttaacataatgatctccagttccatctatgttgttgcaaataactggatatcattcttttttctagctaaatagtactccattgtatgtatgtaccacattttctttatccattcatctgtcgatagacacttaggttgctccgaagtcttagctattgtaaacaatgctgcaattaacataggagtgcagatatctctttgaaatactaattttctttctttcgggtatattcccagcagtgggattgctggatcatatggtagctcaattttaatttttttggaggaacttccaagctgttctccatggtggttgtactaatttatattcctgccaacagtgtacaaagccttctccacatactcaccagtacttgttattgcctgtcttttggatacaagccatttttttttgagatggagtcttactcagttgcccaggctggagtgcagtggcccaatctctgctcactgcaacctccatctcccaggttcaagcgattcttctgcctcagcctcccaagtagttgggactacaggcatggcccaccatgcccagctaatttttgtatttttagtagagacagggtttcaccatattggccaggctggtcttgaactcctgacctcaggtgatctgcccgcctcggcctccctcagtgctgggattacaggtgtgagccaccgtgtccagcctgcatacaagctattttaactgaagtgagataatatctcattgaacttctgatttgcatttctctgatgattcataatgttgagcacctttcataagcctgattgccatttgtatgtcttcttttgagaaatgtctattcagatcagctcattttttgtttggactattgaactcttttttcctatagagttgtctgaactccttatatattctagttattaatcctttgttagaggggtagtttgcaaatatcttctctcattctgtgggttgtctctcctagaaatttttgatatgttgtattcttattttctttcaattcagtgtatttttaaatttcctttgagatttattttttgactcgtagagtatttaaaagttttcgcttagtttcttgactttcctctgtcatctttctgttatttatttctagtttgattccaatgtagtcagagaacacattctgtataatttatattcttttaaatttatcaatatttgttttatggccctggatatagtccaacttggtatatgttgcatggacacttcaaaagaatgtatattctgtgcggccaacaagcatgtgaaaaaaatgctcagtataactaatcattagggaaatgcaaatcaaaacaatgatgagacaccatctcaccccagtcagaatggctattgttaaaaagtcaaaaacaacaggtgctaacaaggttgtggagaaaaaggaacacttgtacactattgggggtaatgtaaattagttcaggcactgtggaaagcagtctggagatttcccaaagaagcttaaagcaaaattcccatacaacccagcaattccattgttgggtatatacctaaaagaatataaattgttctgtcataaagacacatgcacatgcatgttcatcacactgctattcacgttagcaaagacatggaatgaacctagatttctttatccagtgctcatcaacagtgcactggataaagaagatgtggtacatatacaccatgaaatactacacagctataaaaaatgggatcatggcctttgcagcaacatagatggaactggaggccataatcctaaacaaattaccgcaggagcaaaaaaccagctaattgcatacacatggacacaaatagggaaaaatagacactggggcctattgagggtggagggtgggaggacagtgatgattgaaaaagcacctatcgggtattatgctgatgatttttcctctgctgtctttccgttattgatttctaatttgattccattgtagtcagagaaaagtttgtataatttaaattcctttaaaattatctgtacaccaaacccttgtgacacgcaatttacccatgtaacaaacctgcatatgtaccccttgcacctagtaaaaccggaaaagaaaaacaacaaaaaagagccaatgtgtattctgctattgatgggtggagtgtcctgtaaatgtggatttgatcctgttggttgatggtgttattgagctcttctacatctttgctgattttctttctagtttttatttttttatttttattttttttgagacagagtcttgctctgtcccccaggctgctggagtgcagtggcaggatctcagctcactgaaagctccgtccccaggttcacgccattctcctgcctcagcctcccgagtatctgggactacaggcgcccgccaccacgcccagctaattttttgtatttttagtagagtcggggtttcaccgtgttagccaggatggtctcgatctcctgacctcgtgatccaccccctcggcctcccaaagtgctgggattacaggcctgagccaccactccctgccttctttctagttttattaatagttgtgagagttgtgttgatgtctccaattataattgtggattttctattttttctttcagttccgtcagtttttgcttcacatattttacagctctggtgttttgggcataaacatttctgactgcaatgtcttcttgatagactgacccttctattattataaaacgtccttatctttctctggtaattttttttgttttggctctgaagtttaccttatctgagagtagtacactcactcctgtattcctctaattaaggaaaacatgttgtgtctttttccatccttttacttttaacctgcctatgttgttatatttgtgtggttttattgttgtttttgtttgttttgtgttttttttgagacaaagtctcatcttgtcacctaggctggagtgcagcggcacaatctctgctcacggcaacctctgtcttccagggtcaagcgattctcctgcctcagcctcctgagtagctgggaccacaggtgcacaccaccatgcctggctaatttttgtattttagtagagacggggtttcaccatgtaggccaggctggtctcgaactcctgacctacctcaaattatccacctggcttagcctcccaaagtgctgagagccactgagcctggcctatattgttatatttgaactgggtttttttttgtttttgtttttgttttttgtttgtttgtttttttttgtagagtgctgggtttacaggtgtaagccaccatgcctggcctgaactgggtttcttaattgaggtatttagatcatttgcatttagtgtaattttttttcttaatttttatgtttaattattatgggtacacaaccgttgtatatattagtgaggtacatgtgatgttagttacaggcatacaatgtgcaatgaccaaatcagagtaattggggcatctaccacctcaagaatttatcatttctttgtattaggaataatgtaattattgatatatgtattagcttggggtgccataacaaaataaaactaggtggcttaaacaacagaaatatattctctcacagttctggaggttggaagtctgagatcaaggcgccagcatggtcagcttctggtaagggctcttcctggcttatagagagagttgccatcttctgggggcagagtgagagagaaagagagaggaaggctgggagggagaaagagcaagagagcataccctggtttctcttcctattgaattaatcctattgaatcatggccctacccttatgaattcatttaacctgaattacttctgtaaaaggccctatctccaaatatagtcccattggtggttagggcttcaacatgggattctgtgggacacaatccaacctgtagtaacatgaagggcttaattgtttttcatttattttgtttgttctctccagttttcatctctgtttactcttttctgactttctgtggcttacttgggcattttttagaacgccagttttatttatctacagtgtttttgagtgtattgatgcataacttttaagtggttgctttaagtattacatatacatgtaacttgtcacagtctgctggagtcatcatttaccattttgagtaaataataaaaatcttaccttcctaatttatgtcccatccctttatcctcctcactgaaaatacgattgtcttaaatgtttcctctacatacatttagaaccacatcagtgttataattttggcttcaaccatcaaacatactttagaaaacttaagaggagaagaaaaatttattgtatttacccatctatttgcttaccttgttctatcttcttccttgatgttccaaggttcctattttatcatttccattctgtttagataacttcttttagccattttcattatttctgggcaggtgttctccccccgcccccatctccattgacatcttagagagggggccccattactggcttgcagaaatgaaattcttagcttcctaattggtcttcttggataccactgcagagtgatgttggagcaccttgttacagcttcaagagggtgaaagtttaggtctcccacttggtctttctggtgtgaatggcagtagagtcacagttattgctatggtatttgcctagaactgaacagttactttctaaggcttgacaggcttgcctgcctctgtcttggtcttttggctagtgatatcagggcttttgttgtaagtgttgttggggctttttctgtttgtttgtttgtttgtgccagttggtctttccaaattgtcactttcttcagctccaagcccagcatatatgtggcaaaaagaaagcccagggaactcactagtatgtcattcctcagatcctgagattctagctgttctgccttctcatttccaccttttagagtcttcttatgtttgttttatatatatataatgtccagagtttttagttgtacttagtgagatgaataggaaaaagtatgtctactcaatttttccagaagtctttgctgtcaacctttactaaattagtaggtttccttttattcctggttttctaaaagtttattttttaaacataaatggttttttacatttaaaaaatagtttatcagaattgactcatttcattgtattttccttcttaatctcctaatatagtgaattatattgagagatttttaaaatgtgaaacatctttgcattcctgggataaacgctatttgttcatcctatagttacacatttactgttggtgttatttagttaatattttacttgggttgttgtatttacttttataaagcatggacgtaaaacttgcctttcttgtatttccttgtttgtttttgtaataaaaatttctctaaacaataacctaggcagattttgttcttcattctgtttcctggaataataaatagaaatgtcttttcaaagggcagcttttgtttttgttcatctattttattgtttttatctctctttttcttttatgactatctttactatttccttcctcctttgggtgtattctgttcctctttacctagcgtttgagttgaacactcagcttattgattttggtctttttttgtgtttcctagtaagtgtatttaaaggtaaaaaatttccttctaagttctgctttaatcatatctaacacattttgatatgcagtgttttaatttttatttaattctacatattctttatatttttcttttaactcacaggttacttgtgacatttaaaaactttttattttgaagtaattttagaagagtagtacaaagaattcttacgtacacttgtccaaattcaatgatttgcaacattttgtcatatttgctttctttttctctctgtctctgcttccctctctgtttttttcctaaaaaacattaatattcctaagtccatttagggacttactctaaatggttatgaaaaaacattagagagaaaaaatggtttactctaaaatggttaggaagtctggagttacatacacacatgcccctttcctgctaaatatttcaatgtatttcctaagaacaaggctgttctcttacataaacacagaaaaacagtcatattaagaaaatttaacttggatataatattagctaatccacagtacatattcaaattttaccagttttcccaataaagaaccttataactccagccactcccagtctcttgtcctgcaatccagaatcaagcatttcagtaagttttcatgtctctttggtcatttttaatgtgagagagtctatcagtttcttatttattcaggttttattaattagcttgaacttatataattttattattttgcccttcaagaactctgctttttttttttttttctttttggtctagtttatctaccagtttttgagagagggtttgtaaaaatcatcaaatgtatttttaaaaaactcaacttctaactgtagttctttcacttgttgctttataaattgtgaggctgtattgttgagtttatatatatttatgattactatatcttcttgtttctttaaaagttatatgaacatcttttcttttgtcctttatgcactttattttttttatttttatttttttttgagatggagtttcgttcttattgcccaggctggagtgcagtggcacagtcttggctcactgcaacctccatctcccaggttcaagcgattcttctgcctcagcctcccgagtagctgggattacaggtgcgtgccaccatgaccggctaatctttttgtatttttagtagagatggcgtttcaccatgttagccaggctgatctcgaactcctgacctcaggtaatccgtcctcctcagcctcccgaaatgctgggattacaggcatgaaccactgcacctggcccaaaatagaatttaaggttaaaaataaagtgcaggctggacgtcgtggctcacgcttgtaatcttagcactttgggaggctgaggcaggtggatcacctgaggtcaggagttcaagaccagcctaaccaacatgatgaaaccccaactctactaaaaatacaaaagtagccgagcatggtggcacatgcctgtaatcccagctactcgggaggctgagtagggagaatcggttgaatccaggaggcagaggctgcagtgtaccgggatcgcaccattgcactccagcctgggcaacaagagtgaaactctgtctcaaaaataaataaataaataaataaataaataaataaataaagtgcataggccgggcacggtagctcatgcctgtaatcctagcactttgggaggctgaggcgggtatatcacctgaggtcagaagttcaagaccagcctggctagcatggtgaaaccctgtttctactaaaaatacaaaaaattagctgggcatggtggcacacctgtaatcccagctactcgggaggctgagacaggcgaatcacttgaacccaggaggcagaggttgcagtgagccgagattgtgccattgcactccagcctgggagacagaggaagactctgtccccctcccaaaaaaaaatcaattctattttgttacatattgagactgttgcccaactttcttttgtgtcatatttgccaccaggtaaatcttttttccctgtttttaaatttcaatctttacatatctttctgctttaagaggatttgccatatgcattcatattaaaaactttcaataaactaggtattgaaggaatatacctcaaaaataataagagccatatatgacaaacccacagccaacatcttgctgaatgagcaaaaggtggaagcattccccttaaaaaccagcacaagacaaggatgccctctctcaccactcctactcaacatagcgttggaagtcctggctggggcaattgggcaaaagaaacaaataaagacgtccaaataggaagagagaaagataaactatccctgtttgtagatgacatgatcctatatctagaaaaccccattgtctcagcccaaaagcttcttaagctgataaacaacttcagcaaaatatcagaatacaaaatgaatgtgcaaaaattactagtattcctatacaccaaacaacagtcaagctgagagccaaatcaggaatgaactcccgttcacaattgtcacaaaaaaaataaaatacctaggaatatagctaactggggaggtgaaagatatctacaaggagaactacaaaccaccgttcaaagaaatcagagatgacacaaacaaatggaaaaacatctcatgctcatggataagaggaatcaatatcattaaaatggccatactgcccaaaacaatttatagattcaatactcttcttattaaactaccattgagatacttcacagagctagaaaaactattattattattattatttttttgagacggagtttttgctcttgttgcccaggctagtgtgcaatggtgcgatctcggcttaccacaacctctgtctcccaggttcaagcgattctcctgcctcagtctcccgagtagctgggatattacaggcatgcgccaccatgcccagctaattttgtatttttagtagagacatggtttcgccatgttggccaggctggtctcaaactcctggcctcaagtgattccccctgcctcggcctcccaaagtggtgggattacaggcctgaggcaccgtgcccggccagagctagaaaaactatttaaaaatgcatgtgaaacaaaaaagggccagaatagccaaggcaatctgaagcaaaaagaacaacgttagcagtatcacactacccaacttcaaactatacagggctatagtaaccaaaacaacatggcactggtacaagaacagacacatagaccaatggaacagaataaagaacacagaaataaaactacacctatgactgtctgatcttcaacaaatctgacaaaaacaagcaatggggaaagtattttctattcaataaatggtgctgggaaaactgggtagccatatgcagaagattgaaactgcatcccttccttacaccatccaccttaactcaagatggattaaagacttaaatataaaactcaaaattataaaaatcctggaagacaacctaggcaataccattcaggatatactggcaaagatttcatgacaaagatgccaaaaacaattgcaacaaaagcaaaactgaccaacaggatctagttaaactaaagagcttctgcactaaaaaggaaactatcaacagagtggacagacaacctacagaatgggagaaaattttgcaaactatgcatccaacaaaggtataatatccagcatctataaggaccttaaataaatttacaagaaaaaaaaaccattaaaaagtgggcaaaggacatgaacacttttcagaagaagacatacatgcagccaacacgtatatgaaaaaaagctcaacatcactgatcattagagaaatgaaagtcaaaaccacaatgagataccatctcacatcagtcagaatggctactattacaaagtcaaaaaataacagatgctggctaggttatggagaaaaatgaacgtttttacaccgttggtgggagtgtaaattagttcaaccattgtggaagacagtgtggcaattcctcaaagacccaaagacagaaataccatttgacccagcaatcccattactgggaacatacacaaaggaatataaatcattctattataaagacacatgaacacatatgttcactgtagcactattcacaatatcaaagacttggaatcaacctaaatgcccactaatgatagactggataaagaaaacgtgatacacatacaccatggaatactatgcagatataaataagaatgagatcatgtcctctgcagggacatggatggagctggaggccattatccttggcaaaataatgtaggaagagaaaatcaaatgccagatgttttgacttataagtgggaggtaaattgtgaaaacacatggacacacagaggggaactgcacacatgggcctattggagggtggaggtgggaggagggagaggttcaggaaaaataactaatgtatactaggcttaatacctgggtaatgaaataatctgtacaacaaacctccctgacacaagtttacctatgaaacaaacctgcacatttacccctgaacttaaaagttaaaaaagagtatttgttataaatcacacatgatttggttccctttttcctccattattagagcctttgttcttttattggtaactgctgaagtaaagatttacttttgcaactcatttcacattctgtttttattgtacaatgtttcttcccttttcttgctttccatttgatagactgatttttttctgctgtattaaaagttatacatactgattctgttcttatggtggttgcctttaatttaacacagtgagcatttaccttttaaaatgtcttaactaccttaatatttatatcttgcctcctaagttctttagcatactcttatgttcttttgattttctacttccctccctctaatgccaattctcctaccaagtagatattacacacacacacattcatttaccctcttttaaaaatatggtcctggatttgttgacaaatcacccttatatttgttgttgtaaatttcttgatttgattctctttttgtgtacttcctctaagagtgtttttttttttttttttttccacgtccaagagtgttttaaatatgagcctttggattctttgcatgataataaatttgttatgccatctcacttgaatagcaattttgatacatataaagttctaaactccagtttattttccttcactactataaaaatattattttattttattcttgcattcattgctgttgaaaagtctgacatcaatctgatcttactcctttgtaaactgttcttttttttttttttttttctgatagggtatcactctgtcacccactggaacctccacctcccgggtttgcctcagcctcccgagtagctgggactacaggcacacgccaccaggcggggctaatttttgtatttttagtagacacagggtttcaccatattggccaggctggtctcgaactcctgtccgcaagtgatccacccgcctctacctcccaaagtcccaaagtgctgggattataggcgtgagccactgtgcccagttgataaactcttctttctaagttttaaaaatatttatttgtctcaatataacgagcataggtgtggatttttctgaagctcctgttaagtatcctttgaacccttttctctgaggtctttcataattaaaaaaaaattgtaaatttattagtcattattttctcacgtatatatttttttcctctcactgtgagttctcttatgattcagatgttgatacttctatttctagcatacattttgctgaactttcttttatatttttgatgtctttattctttcctactgtcttctgggattatctttcatcttatcttttacctcacaaattattcttcagctatatttatcctggtacttgtctaatctatagtatttacaacttctactgttatagttttaacatctaatattctgtctttgtttttgtgagttactggttttgctttatgttgctggtatcttctattatcttaagtatatttgccattttgtttcaagttcttggttcatcttcttcacaattctgcattagatagtatatggtgttaatttgttgtctatgttttgcaatttttttgttccttagccatatcattatgttgatctgtgagctcacgtctccaggagggcaccagctagtctgtggggtaatgtgtaatggggaagagataaagtcaaatactggtctgtgtccctccagatccagccctggtagagagcccagaaacactgtggatctccccatttgccactactctttcaggcaactcctaggaaaagcacagttgggagtaggcaggtgctccacgttgggattcaccagcgctgggagttggggcagtggtcgtgagtagtggagaagagaatacccaaaagctcacccctagtttcatctgttccctactgatttaccttgaagatacaagtagcctggcctgttgcagcctgtttatgtatgaaggggaggcaacaattgtcccaagccgattgggaaggacatagtgcagaaattaaaaagtcttcctgcagcctgttctcccactgtggcttatctcccaggatgcagccctgcccattctctacgcacaccagctcaagacagcagttctgtctctcctggcaaatataaaaacactttatacttatttctggtgttgccagctccccagatccttgcttccttttgcttctctacctttacaaaaattaattttgggtgagggagctggaagcctgaacctacctatttgccatttcacaggaactggaagctttatttctggtcctcaaagggcaaagtgacaagcgacattcaatagctcatggcctgaggcttcctgatgcccagggtcttacactcgtagccaggactgatgtgttgtcatagccattccaagggtctcttttcaaggtgtccaatggggtggcaagcagggattctgattcatctatgctccagggacaggagagaaaggaacttggagattcatgaggtaggcatgaagcttggatagtgggaggggaggaagatagatgtgtgttgagcatttattgtgcactctattgagcccttgctgggtacaccttgagggctaatttacttcacagaatccaggaggaatgccttcaggggtactttcaggaaagtatccatagatttttaggaggctgtgtggtgaagctatgttcatactactagataatatttaccttataggcttcatgatgtataaatctgcctttcctctaatttataatagaagcatccatatgatttatgaattctttcagattagctcttttaggccatcctagctaaatactgagggtgtttagtatcctcagggtgctttgctgcagctgtccccagctggtctcgttttttcctattttctaattggtctctacccccattcctccctcagtctgtcttgacagatggcagatgcatcttcctatgtggcagtgcttggcactaggtttgcagcaaatgcttgttggattgattttctttagatttgaaggttaaaaagagagtttttctctttataggcacccatcccaatttcttctccttgcaatgctcagtagttgctaccaggaagggctgtcaccaggttgtgtcctaactggaatgagctcttgagtgggagtaagcaatgtttgttggtaggtcaaagggttaacaacagttttaagctcttttttcccatgggaagatgaactccagtttaccttatacttactgtttctttgaaatgtactgtttggataaatgtgaaatgtcagctgtattttaaaaaatcacatttatttatttatttatttatttataagtgtggaaatgacccctggttggtgaactacatctatgctgggcagactgcgggcaggcatttagacttggtggacctatatgaccagacccgtatgaaaacctgttgggaaatgtaggccctggactctgttatggtgtgtttcttgaatccgaatatgcctgttttcttggaatcctcactcatgggttggtataagatgtggttcctgtcatgtgagagattcttccatcctagaatggctcccccgtgcctctcccctactcctgtggtcttgtctactatgaccatgcatattcccatgagatgagagggttaagaatcagcatctagaatacataaagactcctgatgaagatgtctaatgctgtcaggctgacaagctatgtttccatatccaatattcctctacaaagctaaataaataagttgccgtataacagcccaccaagtcttttgagtgtgtatgttaatctgaacccaaggcacaactaatttgtatgaagtaagcattgtaggattttttttcctacaaaaataactttctcttcattgctgaaattctgttgtaaataaacaagtggtaagcagaggatcataaaatgttccttgctcaaagccttaaaattcccaaaactccagcattcaaatttctctggacagaattggaaccaaaatgaagtcacagttaataataaaacattacatttgtgtaatgctttgaatattctaaagattttattctacttttcctgtcttctcttctctgactgactcaatatggcttctcttgtacctgcaaaaagatgacttcaaaatccatttctccaattttgaacccactacagtacttgatatccatgtatgccactatttagaagcaaaggaaataaaatcattgaaatgacactttgaaatagacttggtaggacctgaaaactcactgaatccaatcttctcactcagacagttgagtggacagtggtttaatccactgaaagaggaaatacaagggaaggacatgtttgagaggtgtttagagaatgattgataaaaggtcttagaagaggtgagtgtccactatttttgcactggagtatctacccctgctccaaggtccctcatgttcacatctgttggggatgatgggagggccagaagacagcccacctcatggaaataagagtagccaggctacatggagtaggtcgggaagcaaggaggctcaggaccaaggaaaggtttatcgaataaatattatgaaatgctcagctggtatatgaagagcagtgagggttgggggtatcaggatcacaatccatattcagttccaagatgtctggaccatttcacagttgggatatggtcttcctctaaggaagaacatgggctgtttttttcatacttctgatcacagttggcaagaaggaatggttggagtaatagactagtagttgggttcttagatttgtttcttaatcaaattctcatggctaatggcaagatagaatatgcttatacaggacatttatctgaaagttgtgttacagacaacatccattagaatcatccagggtacttcatgaaaatgcagatttctgaataacctctagaactgctgaattaggatccctgggctggagcctgagaatttgcatttaagcctacttcttagcaattcttatgtacactaaaatttaagaagcatatgtaagctggttaattatgaattattcttatcaatgaaaaattataccaaatgagaattaaatgggacaactggatatttcattgctttgaagaagctggtgacaacttcatctaagacttcccagttgctctttcagtattacttctaaatttactattgcagtttatttttcattaaatcttccttctactggtacaaagaaaaatatctttgtcttcccttttaattttatttatttattttgtttgagacagagcctcactctgtttcccaggctggagtgcagtggtgtgatctcggctcactgcaacctccacctcctgggttcaagcgattctcctgcctcagcctctcgagtagctgggactacaggcgcctgccactatgcctggctaatttttgtatttttagtagagacggggtttcaccatattggccaggctggtcccaaactcctgaccttgtgatctgccagcctcggtctcccaaagtgctgggattacaggcgtgagccactgcgcccggccaattttattttttaattaaacatttctgagacattttggctttaatgaaaatgtttccaaagcatgttcaaagcgtagtccttagtttgatggtctgaagaatggaatcatttattagtggagttcaataaatatttattcgcatttatacatacaaggtcctttggacagagtaagagacacaagacaccaccactccctgaaagagcacacaaaacaattacatagataagaccaacacacacatttgaactgtggtattgaaacttaaaaaaaaaaaaagcctaaagccctctcagtaaaaaagagttgagtacttatcgacacttacatgtttatttatacattatcccatgtactagcatatggcttgactatatacaccagaactcacactgtaacaaatagaaagtttataagttaccaaaataaatagaaactttaacacttccttcctgtatcctcaaggatcatttgcacattccctgtagtgtgcacattccattttgtaaaccagtgtttttagaaaacaatgcctacctatatataaccaagcactaagttctgtgttacagattaaaaaaaccattttagagtaaagagaaataagagcaaacccagactactagaactggtaaatgaaaggaatagcattcagaaaacaatgtatattcaataaatagataaaataataggaaacatttgctttgggttcatgtcaaagcctattaagaaggagacatagacataggacaaaatgcatatgtagaggaaaaagaaacaaaatatagaaatgtaaacattacttccttctggcaaaatgtcttctagcctttggtgaggtatttccagacatttataggctacactctgccaatgattttatttaaggatgacacagtgaatgcttatttttatgtctacaaaaaaagttacaaaatttagttattcacacattcattcatcagtgcctcttgatattggaatgtttctccctattgctttatggattgactgtattcctgaaaagcttgaattatattttaaaaactcagccataagctttgtgggagacagactgtacctgtcaagttccctcttgtatctctggcacctcgcatagcatcaggctcatagtgaatattcaagaatgtcctctcgatggttgcaatatatttgaaaatctcagcattgaaaggaattctgtgacaaaccacttaaaaaagttaaaatgaatgaacattcagtaaattctgattttgatgaaacacagttgttcataagtggacaaaactatcctttaagtaaacccatggggacatttgagttgaataatttatagagacttataatctgaaagagagcgcagacatagtctcatattcttttaccacacagataaggaaaagctggagctcacagaaacttgaaagagcttgcccaaggccacatcactatttaggagcagttattttaatatgtaacaaattacgtgtgattaatctttttcagaaggggttactgcaggttttcttaaagtaacagtattagataatattttataaaacttaaaaactctataacataatgcttcataatgtttaagaattcataaacatttagtaaaaatattaaaaacatgcatagcaatgataaaactgacttcacattggtggttatatctgggggcagtgaaaagaaaatggaaggattcagaggtatcaattttattgtagtcactgatttattaaaaaaaccattgaaacaaataggacaaaatactaagatttaataaagctgggtgtttgggtaatgggggtttatttgcctttctgtgtgtttaaaatacttaacaatacaaatattaaaactaaaattagtaagagatttgtaaactaataggttttttaaaataccaagcagaggaacaaagtcaactgttatttatccaaagaaccattaacagaaataggctatatatatatatatatatatatatatatatatatgctaaagggtttagtcaacaaagtagatattctataattagcagcatgaaggagttagagtacatcttatgttgttataattaatagtaaatatttgtaacatacagaaaatacatggaacaacagtcatgcaaccactactcaaatacagttgtgctgtttgcacctgacttcaggtccacctttcttttccctcaccagatgcaattactagtttaaagttagtgcatatcatttgttattatgttgtgagaattgtccttgtgaaatatggacatttagtttattttaatggttgcacaatttattgtagaaaggcaacacaattttatttacttttttatgcactgatgggcatcccctgactttccaccaattataagcaaacctgcaatgaacatccttatgcatacttctttgtttttgtatttgagaatgtcttcaggtctctagggcatataaacatagaattgcttgtctgtaggattcttgtctctttaaatttgtacaacactgcatatgtgaaataagtagttgaaataagtgggaaaactaacccttccaccaagattctatgcaaattcccatttcttcacatttctgcttcagcacgtggtattgttaggctatctaccttgagataataaagttattctacatttcccccccaaagctttaaacctttaccttttcacatttagccttttatttcatttaaaatttatttttgtaatggtgtgaggtagagatctggtttcatttattccccatggtgatagcctatgttcctgcaatattaactgacttatccaacagttctcaaaatgtgatcagaggattcctggggatgttggaagggagagatcccttggatccttttagagggtcaacaaggtcaaaaatattcataaaattaagatgttatttgccttttttttactctcactctcataagtgtacagaagggttcgccaaagacaacaatggcatgtgatgaatagtgatgactatttctctgatacctaacagattgtgtgcctgtgtattgtattttctagagttttcaaaggtagtgagtttacggtataagtatgtagttttcagaaattatttcttttctaccatgctcttaccagctatcttcagttatacctgttataatctctgtaatctcattatcttccaagaaatcatttttaaatcctaaagtttttccttttacacagaaacataacaaaaattatgtttactttgttgttttgcaataatatatttttcaaaaatgtttttaattaaaaaattttatctgaatagggtggatggttggctttaaaaagggagaagagaaaacacattttctggtgtctagattgcctatgtctagagatgctgaaaaggatgacattgacatatcagcaagttatctgattcctcataaaaaggagaaatctattccaaagaaactgagcacaactatacacaacaaaaatatgttgaaagtgatcttttgttcagctttatagatgttaataatttatcatattgtgtcttgtgcagtaaaacattttcaaacacttatatggttccaacaaagttgcagtatcattttgggaccaatcattcagaatttattaaaaaaaggaattaaataaccgaaatgtagatgtaatacactctttaaaagcttcttacaggataagccatcatattgtattggctagaggagcacacacaatcacagagagactaataaaggcttgaacagttgacattgctgaatacctgctggatgaaaaatcaccacaagaatgcatagtgctggcattttccaatgatgcaataacttgtcaaattaaagatttaactgcaaacataaagactgagttaatatatcatctaaagaattgtaccttagccttacaaagggactgatctacagatggctatacatcctgttttgctttcattcatcaggtatcagcatcaattgaccattgatgatcttcttttatgtgaattctgggcaacaggggttctgaaacattaaaagtgttatatgacttttttgaatctggtggtttatcctcaacaactgtgttaactgtgttaacatttgcactgatggtgcaaaaatggtggattttatccaatggtgggtaaaatgactggtgtcttagcacgaattaaggcaatggcaccaaattttattagtagtcattgtattcttcaccaccacacattcgtagtaaaaaaaaaaacagttttactaaaataatgtccttgatgaagttgtaaaaattattttctactaaatctcaacccttaagcacatttaaaaaaattctttgtgacacaatgtgatgtacccataaaacacttctactgcatgctgaaatatagttgtcttttggaaaaacacttgtttgagttgcaagctgaattagccactttttcttttctttcatggaaacaccatcttttcacttggaaaaaaaaagtgacagaaaattgattattcagacttgggaatttggcagacattttcttgaaaataaacagtgatactatcactttagggaaaacaactagttgtatttgttgccagtgctaaaatttaagcttttaaaagtagaagttggaattttgaaaagcttgtatctgctactgtgggatacttagaattttttctgatatcagcagcaacattaatgaatataatatttttttgagacagggtcttgctctgttgttaaggctggattgcagtggcatgaacagggctcactgaatgcagctctcaaccttatgggctcaagtgatcctcctgcctcagctttccaagtagctgagaccacagatgtgcactccactcttggcaaatttaaaaaaattttgtagagatggggtcttgccatgttgcccaggctggtcttgaactcctgggctcagacagtactcctgccttggtctcccaatgtgctgggattacaggcataagccactgcagccagtttgagtttttgatattgcatgaaatgtttgaacatttcgaatacctccataattcagtaaacagatatttcctaatgaccatataatgttacagaatcttacatgagtaaaaataatttcaaaatgcggataggccaatagatttcaatgacttcctgttgtttatcccctgaaccagaagatttacactcaccctagattcttacctttccctcaaccccttcattctattactcagtactcagtgtaaattccacctcccagacagcagacagctcttaagtgtatgctttcctgttcattactatttctaatgccctcattcagaactctggcaacttactttatgatgtcaaatctcttacgtagcataagaggccactgcccacctctcttctctagcttcccccatttcactgtattgtctagtaagctgatcttattatagcttttttttttttttttagacagagtctctctgtcgctcaggctggagtgcagtggtgtgatctctgctcactgtaatctccacctcccaccttgagcactcctctcgcctcagcctcccaggtagccgggaccacaggcgcacaccactgaacagggataattttttttgtttttgtagagacagtgttttgccatgttgcccaggctggtctcgaactcctgggctcaagtgatccacctgcttcagcctcccaaagtgctgggattacagccactgtgcccagcctattatagctctttataaaacaaaaacaacaaaaaaaccgaacatattgattcatgactccctacctttgcattcacatgattcctttgcctggaatgtcccccttcttctacctgcttgggaattcctagctatatctactaaaattctattcagatgtctttttccaggaagcttttcttaacctaactcacgccattaagttattcgctttatttttctaggttatcttctatttgtttctactgttgtactcatcattctgtaaggtattggggctctgtagaatttctgttacaaaattactttttggtttgataatatttacctacattgagcaatcccataagaaacaggcctgtgaaactctctattgggtttcctaaaacaatattgttgagagattatttaattacctagctttctttttatagggacttgccagagaaatatatttctggtcttatcatattagttactcttcagatttgttttagaaaatagtcaccattaacaccttttagaattggttggtggaaagtttccaatcaaaatcgtggtccacctctagcaagctgtaaaattttatgatctccaattagcctcagtttaaactctagtcaggcatttagcttcacaaaaactgaagtcagggatagtcagttttcccatattagtagagagctgggaagtgctgatgtgcacaacctgcagcctgaaatagttgctttttctaaataacagtaaaactgttgctctctgaggatggataggtggatgctatttgttgtttgcaaagcttagggaaccctgtggttgagattttttccaatacatgcattttttttccctttgcaaagggactttggataattgttaattttcccaagaatataattataattcttttattgtttaaatagagttaatagtttatctacagtttcactttctgcagtttcagttatccatggcttgaaaatattaagatattttgagagaaagaggaagaaaaagaggtgtcagtcacataacttttattacagcacatcgttacgtttctatttcattattagttattgttcatatcttactctgcctaacttataaactttaacatgcatatgtatgggaaaaaaaacatagtatatataaggtttggtactatctgcagtttcaggcatccactaaggatatcagaacatattctctgcatatttaggagcaattaccgtatgatatttttttctttctgtgtaaacacatggtgtcatagtccattttgtgctactgtaacagaatatcacagactaataacaaataacagaaatttattggcttatagttctgtaggctgagaagtccaaaatcaagatgctggcatctgggaagggcttttttgttgcatcatcacacagaggaaggtggaagggtgacagagagagcaagaaggggctgaacttacccttttataacatcaccaatcccaccctaatcacctcttaaatattccacctattaatactgttatcatggcaattacatttcaacatgagttttgcaggggagaaacattcaaatcatagcacatgggttaggtgagaaatgaagagtgaggtatacaagagcatccagaaccatactatatacattccagctgttttggtgtagaagcagcacaaatgtagaaactgcattgtttcttgataaaagggtcctggaaagatgaccagctatacagtttccactagaggaaatgcagattggcttgtacgactttagagtatgaaatataaagatctggagtctgttccatgttttttcaggactggtgtgactatattatggataacgaaggaaaggagcctcctttgaaagaagcatctaaattagggatgggctcctcatttggaggatgttagaaactacgaatcaatgtctctcatgttcaatggagctcccatttttatcggtttcatgagactattattaatttatttgaatccaagatgagtctcaaatatacccagaagaaaaaaaattaagaaatgaaaccaagactcctaatgctttgaatgttcgtaacattcgagaaaaatttgagcctgggctatataatcaaagtctaggatttgtgaacctaacagggttccactgtcacctgttttcaagagagtgctgagaaaaattccaatctataccttaaacaattaggttaaatgatttaaagaaattagccttcagaggactgaatttttaatgatttttctacttggaaaatgtgacttctaaataaaaaaagtgcttgcttattataaaaccttggttcaaaggtaaatactatgttctgacaagtgtaaaataagtacaagcacatgtgaaaataactgttaacagcaaatgcttaagaagtgttcttgttttctaaaataaacatttcctgttcctaaagtttttggatcagaaaatggaaaaatataactctagttaatggggatatgcaatttgactgtagaccaataattaattgtcataaagactttaaaaatccttctagattaataatgtgtagaggagtcttagaggattactcagtaaaataaattcaaggtaacaatattaatctaagtttctttaatattcttgatctgggtaaacattttcataaattaattttgtgaattttgagtttaaaatatgtcctgctctaatttcaccatgtgtaaaataaaaaggcaatcatagtattttagtccatataaaaccatgcctccatttataaaaacagactttttttggacagtttaacagttacagaaaaactgaacaggaattacagagagttcccgtatgtcccctcaagccctcttccctccagtttccactattagtaacatcttgcattagtgtggtacatttgttaaaattggtgagccaatattgatacattattaagtccatagtttacattagggttcactctttgtgcagttttattggttgttatattttattggttttgacaaaggtatgacatgtatccaccattacagtatcattcagaatagtttcactgccttaaaaatcctctgtgctccacctattcatccaacccttcccatggaccactggtaaccactaccttttcactgtctccatggttttgccttttccagattaccatatagttggactcatacaatatgtaatcctttcagattggcttttccttagcaatatgcatttaaggttcctccattatccagagatggttttagttgtcacaacttgggtagagagatcaggggtcaatgctactggcatctagtgggtggtagagactgaggtagctcatgagcatcctacaatgcccaggacagccccctacaaaaaagaattattcagccccaaatgccaaccatgctcgaggttgagtaaccttgtgttaagagtgacatgtggcatgagaaatggggcggttttggctcatgttgtgatattctagattcaggtatttccctgagcagagaggctgaaatgctgaaaatttttcatttgatgaccttgatgcttcctttcctgaccatcgtaaagaacaaatggctcctttgctttggcaagaaatactgaaggtggtggcttttttctgtttgttttgaaatgaagtcttgctatgttgctcaagccagtcttgaattcctgaacttctggtctcaagtgatcctcctgactcagcctccagagtagctgggactacaggcacatgttactgcaccagccttcaacgtgattttttttatttcattcaggtgacaaactcatgctgaggttcccaatttttgtctcagagctaggatattctaaatttgtaaaaaaaaaaaaaaaaaaaaaaaagttaagaaatattaactttctatgaaacactctaaatactaacaaagagcttggtgagttctcccacttacctgtgtcccatctgtgcttcagttgcaaatatatatatatatacacagagagagagagagagtcttattctgtcacccaggctccagcgatcctccctccttggcctcccaaagcactgggattatagggatgagccactgcccccagctcagttgcttattttgcattatttcaaggcagtggaggcaaaacgctcaaaattaatttctcacagatcaacatcacatcttggagtaaaacaaacacatattgaaggtattttaatgtatgttttcttgaacttcttctaactaataggggaaatattttcattaacttttaccaaagatttctggatagtgtaaatatatttttctatttgggtaacagtttatagtatgctgttatttctctgttcatttatttatttttatcatatacctcctagagtaagatttaattgatggaatgttttgtggattctgctgtaattaatgcacataatagcagtcagtaatagatttctgtaaacctatatttattaattatctaataccttctccttcattttgctgttgatttccactaagtagattaaattgtgttcttaaaaacagaaattcatttgtgtatggatacaaaacagaatgttcccaaatgcaatcttggatgtgatgctctaaactttagaaatccagcttcatttattttggattaatttctcccgcttggaggctgacacactgttttacatctatcaaatgcatgattataaaattaacaattttgtacaataatgaaattaaacacacacacacatgaactgtaaactatacagcaccatctctgtgtcatagttttaaaaggcacttccagatgacataaaaaatgaagagatattttttaagaacctattgatttttgatctccaattttgtgtgtggggggttgtttttctttaaccctagttttatctaatttgagattcatgaacaaggtatctctaagggaaagagcagcaggtataattattagttattttataagactttgtgaagtctttggtatagttctaaaaacaaagtgaaagaacctaatgtatgtataaaaatagttttgcaagtcaattggtttctaattctttgctttcaacaaaattgaagaagaaccttatacttgagttgtcagctgacagattattaaaaatattatttaataatagcccattatgtgagttttgcatacgactaagaagaaattttaaaaattgggtgaagttgcctcaacaagtctttattttctcattcatttatatcccagattcattaacaataagtaacatttgtcaacatgaaattgggaaaataaagtccctatccatctcattaagagatgcatttctagttaaattttaccattacaaacttacacttttatttaccaaaatgtgtattacagattgagcatccctcatcagaaaatctgaaatgctccaaaatctgaaactttttgagcaccaatatgatgccacatgtaagtactgtacttaacacaacttcgtttcacatataaaattattttaaatatggtataaaattaccttcaggctatgtgcataatgtatataagaaacataagtgaacttcatgcttagacttgggtcccggcctcaagatatctcattatgtatatacaaatattttaaaatccaagataatctgaaatccaacacacttttggtcccaagcatttcaaataaggcatatccaatctgtactgacattattttgatctctaacagttggtaatcctatcttaatccatataacttttttttgagacagcatcttactctgtcatccagggtagagtgcatgcagtggcacgatcatggctcactgcagcctcgacctcctgggctcaagtgatcctcctacctcagcctcccaagtagctgagactacaggcaggagccaccatgtccagtaattttttttttttttttttttttgtagagatgaggtttccctatgtgcctaggctggtcttgaactcctgggctcaagtaatcctcctgcttcagcctcacaaagtgctgggagtacaggtgtgggccactgcacccagcccatataacttttacacttacaacaagaaattaaaaattcaatgtaagaacatattttgttgcaaagaagcagaataggtggctcaataaaagatttccaagaacaaagaaaaaaattacattaggatgtaaccagggttgagaactcaaaaaaaaaaaaaaaaaagaaaaagaaaaattctacatggggggtagaataaaaatatgaattcaaagtgggaaaaaagagcaatgtaaaatttccaaccattaagaaagaggttgtttgtatattttttaaattaatgataatgggtgtcaaaacattatgatatttagattgaattgaacatatgagcgattaacagttttattttaaagtgttaatatggagaatatgttggaaattatatattttttgcaactatctggacacatgttgacaattttaggtctgtctaagtctatgggaggaggcatatgacatttcacaatccttgtaggagagatgtgaagggaagacccctgagctattcttcctccttcttgtgttaccccagtaggaaaatggacttataactggagaagagaagctaggtgtcagcagagacatgatggagtggacatttctttcagtcctttaccaggaagtcctctcaaactgaggaggaacatactaagggagagacacactagtcttgaagcccatggcattcctgaagatccacctcacaccccaaattaccaaaccccaaagctctcttcagctcagtaggttgtcctttaattttcagtaacccttccctacagcagaagaaccaatttttcttttccctcataatttgaatccctcccactaatttatttgaagatgaagatattatcctcttttactaccagtgaaaatacaatgacttgagaagagaaaatgatctgtgtgacgccagggtagaagtggaagttgtgggccctcgaataaaccactagtcttatacttgaagcaggataaacaataaatgccaaacccaaggcagaaactagaaacatggaggaaaagaggcataaatgcctcatattagacagttacattctaagaaatctttcttgcagcagttactttcctacaatgaccaacttcctctgactccaaatttactccttatgtacacttgggttagatattcctttgactatccaatcataccattgtatagtaccatttacacatgcatacatgctcacctaaagaactttttgtgtgtgtgtgtgtgtggtttttttttttaaatcgagtctgggacctggtttcgctccattgagtcactggtgaaaaatttagtaaatctacgaagagagtttagtaagtgtaagaagagtctgctcactgtgtgtgatattccaatagattcatgtgttctacacacagggatctcttggatataagggaggcatttctcaggtgtctgggtgactttctggtcattatccaggttcctggctcagcttcccaggtctctttgaataagcagaggggatccacattcagacaaggctcctggggctctgaccagaggggctggacatccctggtagacctgacattgggcactgagactcctggaaaacttaagctgttaattttgcagttctccatcttgactgcttctcggactgaccatcagttggtgggttttcatcagccttctgcctcacctcctctgatccaagcagcagcagggactcacttgcatgcactggtcttgtaggcagtgacttttaagccacatcctctgtctaccaggctaaacttgcctgcctgagaggcatactccttccatcctctatcgtacatctgtgagctaccaactctggccctagtgtgatactgccagaatgttgtgtacctcatctatttagagtgggaagcccataaggcaaactgaagaggccccgtatcctcactccctttctgctcagttttttcatttatattatctcaacttcactctactaaccagagcaccaaggaagggtaggttagcaattacgtctatgatgactatagagaagtggggagatgacttatgatcctctttgtgctggattccctactgaaggcatctgatggcttctgatttccctggtctgagaagaaagtccctctccacctctccctccttactctacctcaggctgaggggctcaggcaaccttttatgttgcatatggcataggtatctctgcctcactccagaagggaccaaccaatagccacctactcacctacttctgaggtctagtgcctacagacctggtgttcataaatttaagttctggatttaggtctcctttcctgtagccaggtgatcagtgaccggcaaaaatcaagatcccagacttcctgagtaacctcatcaagactgaggtaacagctcacatagctagtgcatagacagatgcaggttacatggagtctgaatcccgtacacatttggaggctccctttgggactgctgggatgcatgaaacatgggatttcactcacagttgtgctcactatgtgtgatattcctatagattcatgtctctacacacagggatttttgatcattctgaattgttgattcccataaaaaatgaatacatggtgatcactgtatatgctgcattactgaatacatatttacgagagtctccaacacatctttacacgtctgaggagtaaaagaatttcccacagattagcttctggttcccatttcaaacctcatttctgttccacctctggcattgggtgtagtatggctccttagtgctccaggccaaaataagtggcacaggggtaaagtcatttctggtggggggtgggggatttggagaaaaaaagaaaggattgcaggggagtacactgggagggttaggagaaattctggagatacggtccactcaatggaggcacatacaaccaagctgagaaacgacatagtacccaacagagttgggagatgtgaaacccaaacatcaatctccacctgggcatagaggaaatactcgatttccaagcaggttctaggttcagaggagagagcccttggttggaagcgccggtcttgcaggatggggtgggggcgttaatgcaaacttctggtccagcagaggtagaaacagaccagatctaagtagcagctcagaggcagcggacttgagggatgaagacgtgaggcccagagggtggtgcctggcagagaaaacagctgccagacaccaaggccacctcgggttaaagggaacaagttatatccaaaaaaaacccaacacggtgaaaataggaagaataaggatatcacctggagtgttctcctgagacactccccaagaacctggattctttaacaatccctccagagcagggacactcagcacatacatctcccacaaagtaaagtgtctgaaggcctgggcaaacccttctccctccccttctctctcctccacgggccggcccggaggaggctcagggatgagaactactgtcactgctgttccccacctcaccccaacgagagaggaatctttagaggtctgtatccctccttcaccaccccgcctgagcgcctgctggaaaacacaatcaccgtctcaaatctcaccctgcaactgcatccaagcgctttctccaagcgttcggggagccgccggaactcttcttccagacaggcgttccgagactccgcacaataggcacctacccttggggttttgagccgcagtgtctgcctctgttcaagtatccaggctcaggtacagacctttcagtgcaggcggcgggaggcgcgaacacggaggaccccctcaggcatactgccgcccgggcggcgcctgacagattgcctccttgggatcggcggacatgccctgggcgctccagctccgcgcgcctcagacacaggctatgattggcctggctgaacgtcaatcagggctcggcgccgtggaggcgggaggaacgctgtaggcagaggccgcttaactccctacggggttattctccgcctcttctagggtaggcaggtgttcccgagtcccttagggggggtccccgcggcggcctgagatgctcggcgccaggttgtcgcgcccttgagctggctgaagtagacattgactctggagagtctgcgtttttcctggtcccagagccgtggtcccgatactgcgcttcccgctcctccagtcccagctcccaggctccgtcttctcccgcttggcgctggagaaacaccggaagagagagtcgcagagtgactgctgtggccctgcgacctgactgccaccttccaggactctagccctggctccttctaaccttcccgcccctcagtgccccagagaggctggtttgcggacaattattcatcagccggaagaaaaggaggtgccagtgttaggcgcagaagagggttggaccagaaaagctggagaggggcaagaggggaaagagggggaagggggaaggcggaaggcggaagaagtcgggaggggtaacagctcgagcttttcctctagcgtagtttctcttctctcggtgccgccccatctgcttcttgcctcagttccccactcgcacccgtgcacctctgcggcaggcgtgtgaaaggaatgggagggggggcttttggtcgggatatctggtcctccagaccccacagccttggctgagaacttacttaagcccactccaactgacttgataaatgagaatcttgaccagcccactggtaggtagaaatgagggacgtcatctatccctgaatggaataacgcgaaaccgcaggtcacgtggatgtgggaatccacagcactggctgcgctcctaaggctcctaagtccacttccgaacctcatctaagaccctgaaagccagactagggacacattggattattattattattttttttatttgagacagggtctcgctctgtcgcccaggctggagtgcagtggtgtgatcttgtctcactgcaacctccgcctcccgcgttcaagcgattttcgtgcctcagcctcccgaggagctggatctacaggtgcgcaccaccacgcctggataatttctgtatttttagtagagacggggtttcaccatgtttgccaggcttgtctcgaactgttgacctcaagttatcctcccgcctccacctcttaaagtgctgggattacaggcctgagcctctgcgccagtcctacacgttggatcttttcccagacctcctcctcagacgtggagcgtacaaatgatgctccatcggttactctgatcctgactttgggactgccagataaaactgggagaaaccctacatttactcttactgtaacgtattggcttgaaactgcaggtcagaacccatttatgttgagaccaaaagactttttttccaagtagaatgaaatagaataaaatacaattgaaaatacttgcctgcatcacaggtaatgagagtaactatagtttcatgaaaccgttgtttcagttaaatatgtttttgcgtgtgtgcatgtgtatcgggaggagatatgtatttcatatatatatgtagagaggtggaaatcaacaacaaaactccataatttttcttgttttctaacagttcttgattttgagtaaaaataattctttaagaacaaaattttgagccagctaacgaaagatcagagtcaagcagcctctcattggggcctgaatagaggttcatcttatttggctttttcgtttttttcctatcttgtggactccttttaaggcccagcaaggaattaccctccccaagtttccactctctgcttggttcagccattcagctgtctctcgggctctttgattaataaaaagtccagtagagctattttatcctatgcatgtgtgggaagagggcaatgccagtgattctttcctgatttgacagaaaattcacaaatcacgttaccttctgaagatagagattttaagctcaaacattatcaccagagaactgaattattaagaaagatgagtggtcaaaagtacagatgttttacagattaagggtcattttgtcaggtcctgtccaaaatatttgaagtctaggggtttgaaaaattgttagaaataaccatttatgacaacagttttcatttattgttctctccagcttcaggagcaggggagaacatttttttccttcttaccttgctgagaattttttcaccagggtttcaaggctaagaactgaaattccagcattgacattgaattaaaaagaagcaagcccttttaggaagtcaaattttattatatgagatggaatgtaatattgagattacttattacttaggcatgggataggggggcttttaacaacagaccaaaaaaaaagttggaaggataggaatgaaataaagcaaactttcattattcatagatgatacaattgtctacagagaaaaataatctaaaacataagaattaagagtttggcacagtggttggctaaatatataaacaaatctattgcattttctataaaaacaaaaaagtagaaatgtgattaactggtttatataacaaacttacagtacagttgacctttgaacaacatgggcttgaactgtgcaggtctacttatatatgattttcttctgcctttgccacccttgagacagcgagaccaacctctcctccccttcctccttcttagcatattcaccatgaagacatgaggatgaagacctttatgatgctccacttccacttaatgaatagtaaatatattttctcttctttatgattttttaaataacattttctttgcttttctgagacaaggtcttgctctgttgcccaggctagagtgcagtgttatcatggctcactgtagcttcaacctcctgggctcaagcgattctccacctcagcctcccaagtagctgggactacaggtgcacgccaccctacctggctaaatttttaattttttgtagagatggggtctcgctatgttgctgaggctggtctccaactccttgtctcaagcacttctgcctcagcctcccaaactgctggaattacagccatgggccaccgcacctggccaacattttcttttctctagcttactttactgtaagagtacagtatataacacataaaaatataaaatatatgttaaataactttatgttattggtaagacttctgatcaacagtaggctattagtaaagttttggaggagtcaaaaattatgtgcagatttttgactgcacaggtggtcagcgctactaaccctcgcattgttgaagggtccactgtaatcaggaataaattctcaaaaaggaaaggcatgcaagatcttagtggggaaaattaaaatcattaaaagaagttgaagaagtactgcacagatggagagacacattcatggttaggaagcatcaatatcattaaaatgccagttttccccaatgtgatctatagtttcatgctatttctagaaaaatttcaacaaaatgttttatagaattggacacaatgatattaaaatgaaacgaaggaacacaagttcaagaagagccaaaataccattgaaaataaagaggaagttggggaatttcctgactacatgagaagatattatatacaccactggatttaagaccatgtgctattattggtgagagagggagtagacaactgggccaatagaatagaatggaaagagtgtcaggaccccttgtatgtgaagaatggtcattaaagaccagtgggtaaaggatgtataattcaataagtttgaatttatgacactggattagtggatatatatacatcataataaattccagatgaactaagtaccgacgtattgaaggcaaaactgtaaaacttttaaatgaaaatgtgaaagaaatatttgtatgacttcaaggtagaaaaatatttattaaaaagacacacatacacattttaaaaacaaaaatgttaagagaagatgaataaatttgaccacattaaaattagaaactttaatcaaaacacactctaaaggaaaaaaagccacaatctaaacttatttatatcacacataatttacataggatcaatatccagaacatctaagaatagccccataggaaaatgatcaaaagatgtgaaagggcagttcacaaaaagggatatataaaagaccaataaacgtacaaaagttaagctcacaatagttatcagagaattgtgaattagaacagtccttgaaataacattttaaaatcactaaatagacaaacattgaaaagtctaacattatcaaaaatcaatgaggatgtagggtgaggggaactcatactctgatggtggacttcaaactgaaataatctacttggaaaaaaattggcattttgtagagttgaagctgagaatatcctaaagcatagcagctctacccttaaatatatatgcaccttagggaaattattgaataaggcaccaagagcaatgtgcaggaaaagtcatgagagcattctttgtaattgcaaaaagctggaaacaacccagtgtccatttgcaggtaaactgatacacaaattttggcataatcataatgtggaattctctgcaacatcaagatcagtggaatacagataaaataataaacttgcataattcttaaaatcatattgttgaatgaagaaaacaacagaaaactacattttgatattaattatgatgttaatttgttgtcagacaaagacaatatttactatgatgaaaagcaagataatgatcaactccaaatttggaataatagttgcattttgcagagaggaagggagattctaagggaagacaaatacaggaaactttaatgttaagggtaacgttccattccttcatgtgactggtgggaaaaaatggatgtttaaaattcttgtagatatgcatcacatgcattacttatttgtagaaaaatatttcaaaaactggatcataagaaaaaaggaaaaagatgtataagaaatcatttgcatagagacagaagtaacaaaggcaatttgatgaaatttattgagacagaagactaaaaaatgaaaaaacatggtaaatataaaaatatgatggcagaagtaatccagatatatatgcatttgtaatgtccatttatatcattgcattaaatctaaatttttctgctcagtaaagatggtctgtgtgtgtgtgtgtgtatttgctattcaaaaagtgctggtggcaatggcttatacctgtaatcccagcactttgggaggccaaggagggaggatcacttgagcccaggagtttgagatcagcctgggtaacatagcgagaccctatctctacaaaaataaaaaaattagccaggcgtggttgtgcatgcctgtagtcccagctactgaggaaactgaggtgcaaggatcgcttgagcctggaaggttgaggttgcagtgagccgtagtcgcacccctgcactccagcctgagcggcagactgagaccctgtctcaaaataaaaacaaaaacaaacaaaaagcacctaaaacaaaatgacaccgagtgattaaaccaatggacaatgataaactcaggcaaatgctaacaaaaattaattatggatagaaatactgtcttactccattttgtgctgctataatagaatatccaagactggataatttttaaagaacagagattgacttattacagtcctagaggctaggaaatccaaggttgagaggcctgcatcttgcaaaaatcttctggctgcctcatactgtggtggaaggcaaaagggataaaaagagagctgagagagagaaagagaaagagagagcgcccaagtgcaacaggttgaattcacaggcttttagcctttttgtaattggcattaattcatttatgaggatggagtcgtcatgacctaaacacctctcatcattaagcctcacctactaacactgttgcattgaatattacatttccaacatatgctttttggggacacattcaaaccattacaaatactaatattgaacaaagtagaataaatgatgaagaaatttttcagtgtcaaagaaggatactttattatgctaaaatgtacaattcaccaactacccataagttataagccttcatatcctaaacaagtctttgaaagttagggaaaaaaatgtgctttgttaggaaggataaattgacacatttaagagcttttagcatacttttaaactaaactgtcatatccaattgtaaaataatgtgaatgtaagatattttgctaaagcaaataatgatcttaagttatcaaatatttataaaattgtgtactcaacaaatagtgaatgcatattttcccaaacataatgcattaaaccacaaagtaaaattaaatagaaattagaaactacacgggctatattctctcaccggtataaaacacatacatagaaaaacaaaacaaaactaaaataaaacaaaacaaaacctcaccaaaacagtactaacaagaaagcctccacttggaaacttaaaaacatctcactaatttttgggttgaaaaggaaatcaaaattgcaattcaaaggagttatgtttttgctaggaatatggagggaattcagttcagaattcatttctctatatagtacagcaaagagaatgaaaaagaaaaccacacaagaacctcatttttagtgaaactaggaaacaaaaagtatggttacatcccaaattgcatgtcatttgtgcttaaagcaacggagagcagaactgggcataagaagccaaaatgttgctgtggcaacagatgaaagcgtggagggaactagtggtgcgggatctcggaaagggcccgaaaatattctctctctaagagtagaagccagcctaggttggagctgttggcagttggcctgagctacagtgaggcccagatgctggggaaggcagaagaaggcccacatattgggggagcagactttgttttggaggttccaaggtggcagataacaaaggttccctctggaatgcagggggtcctaacaccgtggtagaatccttcctgaaatagattaaattccccaagttggaaaaaacatggatgcagcgtattttaagataaagtttacgtgttagtaataaaggattggtccttcggttgtaaaacctgggaggttactattgcccatgtcttctctcaccaacccatcatcccacccccatccaataggagtcttccactaatatctggtccaggaatgctcaatttattcagaataagtaggaaaagaaatggcacagttccacataaatatgccatgagaaaaaaatgtttacagaaagcagcaagatttccctccagaagtaatgaagcaacctcagccatgaagatcatggagccaaaaggatgaccttcagcagaagcagttacgagccaaagaggtccaagggcactgagggaggagccaagtggtaagggccacctctggctgggatccagggtgcccaagtgggaaaatgagcaagccagagagtgcttggtctagggattaagaaaagcacacagtaataggttggacactaaatttgaaaatgaacagtgagaaaaatgctgtggggaccaggattgaaatgaagtaacagaacaattaaaattacatgatccagggacagagacttgaactcataaacaggcctgtgttgcccattagtcacaaggggagcagtgagccattgttaaaatgccaaggattcccaatgcagtttacttggaactttgcccagcgatgaaggagtctgacttgtcttttctgtaatagttagaatcaaagaaaaataaagcacagctggtgggagggtgagaagcaagcatcatgaaccacggtctaattcaaggatcaaactgctgtccagttctggcagattttggattgcaaggggaataaagctgagaggccatattggcacctaggcacagtgaggtgagtctggccacgcatttaagaagcccctgcaaaatgatacaggtggttactaaaaaccacctctggcctctggaaaaaaagaaatagcatctcccggataagaatatctgggtctcacacctattgaccaggtcgagatagggttcagttggggatgggatataataaaaggcatgggtaaagaaactgggcagaggcatagtgcctgcatgttggagattaaggagggaattcggaactcatttttctatatatattacaacaaaggttaagtttggaggttaagtaaggatgctgcagctcactcatggttgcttttccttcagagtactcatgcctcggcttacccagggggactcaaggagaggaatgtgtgtgcgcatatctatctatctatctatctatctatctatctatctatctatctatccatccaccttctaatctacctaaatcaatcactgtgtgtatctattccaaccacaatggactcctatcattcaatttcatttagtggtacatctcagcccagtttacagaaaagctgtaaagggctgtaaaaggctgtatgagaacataatctgaaaagcgttgctcaaaagagcatattatatattattgggcatttatgaagaaattagatctcacactgagctagttaataaagatttataattacaaatgggctgcagcatgtgattctgaacttgactatttccttttgcccttcagtttcagactatgatatggattatgattctctaccaccccctagtggaaattcattcatttctttttaagtcctgtttcttctaatcatttagtctaaatgattagactaaatgagaaaattacatagtaaatatctggattcactcttgttataaaaggttcaaaccggccgggtgcggtggctcacacctgtaatcccagcactttgggaggccaaggcgggcggatcacaaggtcaggagattgagaccatcctggttaacacagtgaaacccccgtctctactaaaaacacaaaaaattagccttgcgtggtggcgggcgcctgtagtcccagctactcgggaggctgaggcaggagaatggcgtgaacccaggaggcggagcttgcagtcagccaagattgtgccactgcactccagcctgggctacagagcaagactccgtctataaaaaaaaaacaacaagttcaaaccatacagaagggtacggagtaaaaggtctcctttgtttctccctcctccccattccattctaggtcccaaaggtaactgtgtgtagtttgtgttatactaggatatttcctgtgcttttacacattccaggtatatggcaggaaaaatcctgagacatcaactgaggattattttcctcaggcatctttctacaacagaggcagataacgcatttcccctcatgccatgggagacagaccacagcaaaacagcaatgaccaaaagattaagatttttcatttaaaattttacatttgaaaaccatggtaggccaggtgtgatggtcacatgcctttaaccatttaggaggctaaggcaggaagattgcttgagcccaggagttcaagaccagcccggacaacatgacgagactcagtttctacaaaaaaaaaaaaaaaaaaaaaaaaagaaaagtaaagaaaaaaaaattagctgggcatggtggcgctcacttgtggtttcagctactcaggaggctgaagcaggaggattgcttgggcacaggaggttagggatacagcaagccatgttcaggtcactgtactccagcctgggtgacagagtgagaccttgtctcaataaataaataaataaataaataaaatagaaaacccagtagaggccaaatgaaagaaaggtctttggagatgaaaaaccttagattactagatatctgaagtcagcacttgttccataaataatagatttgggaagtactccggataatcttagagccaattttcttctgtggaagtgataagaatccacaggctgaagacagaaagagtgtcaggaactggttttggggtcttgcactctgtaatccagttaaactgtgtgacagagggtcagtgcctcctccaactcagatattttgggcatacaaggatgggatcaaagagtgtgctgtttctggtctacggaatattacaaatttgaatgaaataaaaatatttctgacagtttctaaactctcttttcttagtactcaatagaatggactgtcatccatgctgggtaaggaaagatcttgacaaggaaaggaaggaatcagggtttcatgagagacagggttctagggatccaagcaccatgatgaggtaatggctaagttttctcttgggtaatgcaaagaaaagttgacctttactgctgtgaagcaaattagaagctaacccggggtgcattcgtttggtttcttccagaagcatccctgacacagggacatgaatgaaagtaatttattttggaggtgcatgaaacttcagtagcagctgagtaaaagattgggaagggaaaacagccaacgaagggtgaatgactggaacttaatcccctggggaaattctgggaaagcacttgcctcagagttaacccagccacggaaggagggagttgggcaattgtacatcaattcccattggttgaaggctgctgcctgacacgtgaactcttcggcccttctagtctgctgtgagtcgggcagagtggcccttcttggctttgaggaagccttcaggaatgatgcaaatgtccagccagtgtgcactacagtggtaaggcccaaggaacatggcaggtattagtagcatcagccataccaggtctatttctagttggagaacccttagatgactggagcctgtgatctcttacatctgtaatatctgtgatcagaatggaagaattttctattgtcttttccttttcaattttgcccaagccttcataaagttttgttaaaactttgacaacagtcttatttttacattcctttaatcaagaaggacaggcctatgtccaaatataggaggatgtattagtttgctagggctaccataagaaataccacagactgaatggcttaaacaacataaacttattgccgcctggctctggagtctagaaatgtgagatcaaggtgtcagcagggttggtttcttccgaggtctctgtccttggctggcagatggttgtcttttccctgcatcttcctatggactgccccctgtgtatgtatgtcctaatctctttttatatggatactagctatattaggacctactttcataacctcattttcacttaattatctttttaaagactctaactccaaaaaaaattcacgttctgaggtactgggtttattcaacattatgaacttatagggggacacagttcagcccaaaaagaggaaaatggggcaaagggaaaatccttcttctccatcttctttcctgttctctctcaaaggccaaggtgagtgagagcaacattggatcatgggatcttggttgccctgcaactcaagagatatttggcttcaacgttagcagtgagcaacagcagagctgagaacagtggtatagaactgagtcacactgagtcaggctacatttcccaggctaatttgcaaaccagaattccagatataatttttattcactcaaactttccactcatgaacttcttaaatgtattttgaaaaactatgcacatcctcatacatgttttttaaatttaactttttattttgaggtaattagagagtgacatgcagttgtaagaaataatacagacagaaccttttaccctttaatccagtttccctgatggtaacatcttataacacttcagtacagtattgcaatcaggatattgacatttgtgtcaatgtcaatattacagtcaagacagtatttttgtcactccaagtatcccttatcttgcccttttatggtcggttcacctccttcccacccccatcacttccttaaccactggcaactatgaattttttctctatttctgtacttttgtcatttcaagcttcttaatacaaaatgttatacaaatggattgtgctttttttttcttttcaataaagtttattttatttatttatttattttttttgagatagagtctcactctgtcacccaggctggagtgcagtggcaccatctcagctcactgcaacctccacctccaaggttcgagtgatgttcatgagtcagcctcccgagtagctgggattacaagcatgtgccgtcttgcttagctaatttttgtatttttagtagagacgggtttcaccatgttggccagctggtctcgaactcctgacctcaatgatctgcctgcctcggcctcccaaagtgctgggattacaggcgtgagccaccacgcccagcctggattatgcttttgatgtcaagcctacgaattctttgcctggccctacatctcaaagattttctcctatttttctaaaattttaatagttttacacttcacatttactctgtaatccatcttttttgtttctttatctatttttagagatggggtcttgctctgttgctcaggctggagtgaagtgacgtgatcacagctcactgcagtatgtaaccttttgggactggcatttttcactcagtataactctctggagattcatccaggttgttgtgtgtatcagtcattcttttttattgctgagtattatttcatggtataagtgtacaatagttggtttaaccatttacctgttaaaggatatctgggttatctttggctacaatgagtaggcagttagacaaacatttgcatacaaggttttgtgtgaaggcattgtctgtgcttgtgtatttgtgtatgcaagttttcatttcttggggctaaatacccaggagtacagttgctgggcaggatggtagtagtatgcttagttgttggatttttgttgttgttgttggttttgttttgtttttaagaaactgccaaatcatcttccagagtggctgtaccattttatattcccatcagaaattatgagagatccagtatctcttcttccttgccagcatttagcattgtcgccttttttttttttttttgagaaagagtttcactcttgttgcccaggctaggtacaatggtgcgatctctgctcaccgcaacctctgtctcccgggttcaagtgattctcctgcctcagtctcccgagtagctgggactacaagcatgtgccaccacacctggctacttttgtattttcagtagagacagggtttcttcatgttggccaggctggtctcaaactcccgacctcaggtcatctgcccaccttggcctcacaaagtgctgggattacaggtgtgagccaccgcacccagcccattgtcactatttttattttagccatcctgataggtgtggagcgattatctcattgtggttttaatttgcatttccctaatggctaatgatgttgaacaacttttcatgtgctaatttgccatttttatatcctccttagtgaaatattaccttaagtcttttgcctgttttctaattggatttttaatgtgttttctttgttgagttttgagagttctttatatactctagatactagtcctttgttcaatgcatagtttgcaaatattttctcctactgtgtagctcattttttcatccacttaccagatcttcacaaagcaacagttttacattttgatgaaatccaatttatcagtttttcctttcatagatcatgctctcaatgtcaagcctaagaattcttcgcctagacctatatctcaaatattttctatttttctaaaatttaagagttttatgctttacatttactccataatccattttgtttatttattttaattaattgtatctggtaaaggttaaggtattgcatttctctgacatttttttttttttttgaaacagagtcttgctcagtcacccaggctagagtacagtggtgtgtcacagcttatgacagcctcgaactcctgggctcaagcaatccttctgcctcagcatcccaagtagctgggactacaggcaggagccaccacaccaacattatttttcatttttgtgtatagacagggtcttgctatcttacccaggctggtcttgaactcctggactcaagcaatccaatccagttggaattaaattttgcataaggcgtgagacttaggtcaagtttcatttttattttattatcttgcctatggatgcccaattgttccatttcaccattgttcaattcactatttgtgaaaaaggctatttttcttccactgacttccttttgcacctctttcaaaaatcatttgggcagattgtgtgggtctttttctacgttctctattttgttccactgatttgtgtgtccattcctctgctagtaacacacagtcttgattactgtagctataaaacaatacttgaaatagggcagactgattttcaactcactttattcttctttttcaagaatgttttaggcgtcggcgtcgctcccgccctggagctctaggcccgcttttccccgcttgagtctggcgtcggggtcattgtgtcttgacaaccgctccggtacccctttccgaggcagcaggtgcggccgctttagccttgagcgggctccgcgtctgcctgctggtctctgctagtgccgacccttctgttcgcggaccccacgccaagcagcgaccctgagccgacaggcggagcacccggcaatggcggcctccacggcctcgcaacggcccctcaaggggatcctgaaggacaacacctctacgacttcctctatggtggcgtcggccgaacatccccgtgggagtgtccacgagcagctgagcaaaaaatcccagaagtgggatgaaatgaacatcctggcgacatatcgtccagcagacaaagactatggtttaatgaaaatagatgaaccaagcactccttaccatagtacgatgggtgatgatgaagatgcatgtagtgatacagaaaccactgaagctatggcaacagatagcttgctaagaacttagctgctgctgaaggcttggagccaaagtatcaggttcaggaacaagaaagcagtggagaggaggatagtgacctctcacctgaagaacgagaaaaaaagcgacaatttgaaatgagaaggacgcttcactacaatgaaggactcaatatcaaactagctagacaattaatttcaaaagacctacacgatgatgacaaagttgaagaaatgttagagactgcacatggagaaagcatgaatacggaagaatcaaatcaaggatctactgcaagtgaccaacagcaaaataaatcacgaagttcatagaagggatttgttcaacactcttattgtttgttagatatgaaccccgttgctataatacattgcttctcgttctccacaagtcatgacttaagtaccaaagtgcataccagttattatatattgccaagaattaaatgaaaaccttaaagactgattagactgaaaatgcctaattgatatatatattcttgtgcctagtactttaccacaaatacggtgtaatatcatcagtccaaaactgtattacttttgtaaaaatactggttaatttgtatattatatagcttttcatgctttagaggttaaacaatatctttggggggggggaactaatttattttcatcactctaaatgtggtgatagctcttataaagtttgttgacttttttttttaaccaaaagccaattgaacaacaggatatatatgctgataaatattcaggctgaatagtattttaacacttgtcttcaacttgatttgtctgtttaattgaaaaggattgtgacctggcacggtggctcacgcctgtaatcccagcactttgggaggccgaggcaggtggatcacgaggtcaggagatcgagaccatcctgactaccacggtgaaaccccgtctctactaaaaaaaatacaaaaaactagccaggcatggtggcgggcgcctgtagttccagctactcgggaggctgaggagggagaatggcgtgaacccgggaggcggagcttgcagtgagccgagattgtgccactgcactccagcctgggcgacagagcgagactccgtctcaaaaaaaaaaaaaaaaaaaaaaaaaaaaaaaaaaaaaaagaaaaggattgtaagagttactgttacattttctggcctactacctttaaaattcctgttgcatttctttgtatttacaaggaaaagactgaactttttctcatcaaaactagcttttttctcacaggttaaacttgcaccaatgtctgctctttttttttaatgtttttggtactctgggcagacttcagttttttaaaaaataaagattctaatgcagctatcttggcattccctttaaatacctgtcttaacctcctacttttatttcctactcctttccacacacatgcatacaatcctttaccttttaaagaatcattaagactgtcacacattaggaactctttcgctcactcttctgtcatttgctgcaatattgaaattcttattttgaccatcaatgcctattaattcttctaatacatgaagaaaatgattgagtagcagcagtactataggtgggaaatacagtttaactgctgaatttttatacctctctgatttatagcttgctaattaaattgctattaatagtttgtttggcttaattagacttaagaaaacaacaggttttttttttttgaggtttttttttttttttttgcatgaggagagaattgtatgtaaccagtgatatgattattcctgaatgtacagacagaagtaagcctggacattgtttaatttaaaaactttagtccctgctttaagggaatatgataatgtatactatgacaaatgtactttattcttctaacacagtaagaattacttggaactttttcctgaaactaagtgcaggaaagccctgtgtgtcttggtttagtgatggtttcatttctagccatacaactgatggattgtatacaatttttgttagtgccaaaataatctgttatatgaacagacttctaaaataatttctgtatattatatatgtaagaaggcttttattgaacagcttattttccacttgcaagtttatggaaatatcaatatgtcaaaataaaaagtgggacaattctttgctgttagaagaatgtgcttattattttgatttcttaaatggtacataatcaaagtactgctgaactataggtgcagtattctactaaacatttcagctagtaataccactgatttagaaacaaaactgtttatttttgctttctgaatttagaatgctgggattacctgtttaaatatgttttagggaatatagagattaaatctgtacatacctgtgcacatatattcatgcaccctctgattttggttttctcgtttttgagttcttagaaagtatccacatactcttcttttagtagaagtagctgttttagagagaagaaaaggatgagactttaaatagttgattctttttgtgttttctacaaacttttttgaattttaaatcacaagcaaactaattttctggtttttagaaagtagatgatgatttcagaggagtaagacatgccaaacagcgtgctcggtaggattttaggtagtcaaatgcagctgagaaaaagtattttcaagtcataagttgctaattgatatgctatgaactagtcaaaataggaaccatatgattcatgttagattttcctctagagatggatctgaatgttcagttccagccaaggtagattttactttcaactttttaatcaatatcactttctgtgcttaatctctttggtgttaccttgtccattttcatttgtctaaaattctgcagggatgactacaatttggcataatggtataaatgaattgttaagggtaactttaagttgaagattaaagcaagatgccattttccccatgtctttcattttgtttacattttttccctttaagttagtatacactacacatactacaataaaatataataatatgaaaaaagaatattttagatattctagtccctttgcctttccatgtaaattttagagtaatcctacctataattaacaaatcttgcaaagattttgattggaattgtgttaaacttgtatattggtttggggagaattgacatatttactatattgaatcttccaatccatgaacagtatttctctccacatagatagagactgaatagatcttctttgatatcgttcaccagcattacatagtttttagcttgcaagtcttgcatgttttgttagatttacacataagtgtttcatgtatttgagtaattgtaaataatatatttatatttttgggccaggcgcggtggctcacgcctgtaatcccagcactttgggaggccaaggtgggcggatcacaaggtcaggagatcgagaccatcctggctaacacggtgaaaccccgtctctactaaaaatacaaaaaattagccgggcatggtggtaggcgtctgtagtcccagctactccggaggcaggagaatggcgtgaaccccggaggcggagcttgtggtgagccgagatcgtgccactgcactccagcctgggcgacagagtgagactccgtctcaaaaaaaaaaaaaaaaaaagaaaaaaaaaaaatatatatatatgtatcatttgttcattgtgagtatgtagaaatacaattgatactggtttatcctgtattctgttaatttgctgaaatcacatatctagaagtttttctgtagcttccttgtgattttctacatagacaatcatgtcacttacaaatgggagctgtttatttcttacttcacaatctgtatgcctttaatctcctttttcatgcctattgcactgtctagaacttccaacactgtgaataagagtggtgagagtggacattcttgccttgttcctgattttaggtagaaactattcagtctttcagaatcaagtatgttcaccataggatttttgtagacgatctttatcaagtaaagaaagatctcctctactcctatatttctgagattaaaaaaaaataatgaatgggtgttaaagtgggttaaatactttttcttcatcaattgatatgaacaagtaaattttcctcttcagcctataatatgatggattacattaattaattgtgaatatccaaccagctttgcatccctgggataactctcacgtggtcattgtatataattctttttatatgttggtaaattccacttgctaatattttgttaaagattgctgcatcatgaggaatattagtctacagttttcttttcttcccattgtcattgtttggttttggtattgaggtaattctagctttataaaataaactgggaaatgcttcctctgcttctattttctggaagagattaattggtgttaattcttctttaaatctttggtagaattcttcattgaaactatttgttcctaaatatttccttttgtgagtttttaaattatgaattcaatttcctcaataggtgtagacatttttgaattattttatatttagtgagttgtggcactttatattttttgagaaaatgatccatttaatttaagtgtcaaatttatgtgtgtagaattgttcatagtattcttttgttatccttttgatgtctgtagaatctttgatgatatcccatttcatttctgatgttggtagcttctatcttctgtcgtctttttttctgagtcttgctagtggtttgccaattttattaatctttcaaagagccagctctttgcttcattgatttttttttgcttttgtttttctgttttcagtttcattgttctgcttgctttttattttgttattcttttactagattcttgaggtgagagtttagattattggtttgagacttttcctcttttccaatgtatgcagttagtgctttaaatttacttctcaaatgcaaatcaaaaccacaatgaaatgccatctcacgccagtcagaatggtgattattaaaactcaagaaacaacagatgctgacaaggttgtggagaaatagaaatgcttttacattgttgatggaatgtaaattagttcaaccattgtggaagacagtgtggcaattcctcaaagatctagaaccagaaataccatttgacccagcaatcccattactgagtatatacccaaaggaatacaaatcattctattataaagatacatgcacttgtatgttcattgcagtactattcacaatagcaaagacatggaatcaacccaactgcccatcaatgacagactggataaggaaaatgtacatatgcaccatggaatactatacagccataaaaaggaatgagatcctgttatttgcagagacatggatgaagctggaagccattatcctcatcaaactaatgcaggaacagaaaaccaaacaccacatgttctcacttataagtgggagctgaacaatgagaacacaaggacacagggaggggaaaaacacacactggggtctgtctggggcgaggttggagggagggagagcatcaggaaaaatagctaatgcatgcttgtcttaatacctaggtgatgggttgatatgtgcagcaaaccaccatggcacatgtttacctatgtaacaaacctgcacatcctgtacatgtatcctggaacttaaatttacctcttataactactataactgtatcccacaaattctgatatggcatattttcatttttgtttagttgtgtttattgtgtgtatttttaaaaaatttccttgagacttcctccttgacccatgtatttctaagtgtgttgttttgtctccaaatgtttagatattttcctgttgttgatttctggtttggttccattgtggtaggagaacactttctttatgattttatttaaaaaatttgttggtcttttattgtcttagatatggtctatcttggcatatattctgtgggcacttaaaaaaatgttattctggctgggtgcagtggctcatgcctgcaatcccagcactttgggaggctgaggtgggtggatcacctgaggtcaggagtttgagaccagcctgatcaacatggtgaaacctcatctatacaaaaaataaataaataaataaataaataaataaataaataaaaaattagccaggcatggtggtgtgtgcctgtaatctcagctactcaggaggctgaggcaggagaattgcttgaacctgggaggcagaggttgcaatgagccgagattgtgccattgtactccagtgtgggcaataagagtgaaactccatctcaaaaaaaaaaaaaaaaaaagtgtattctgccatggaatactatgcagccataaaaataatgagatcacgtcttttgcagggacatggatggagctggaggccattatccttagcaaactattgcaggtacagaaaaccaaatactgcatgttctcataagtgggggctaaatgatggacacatggacacaaagaggaaaaacacatactggggcctattggagggtggaggttgggaggaggcagagggtcaggaaaaataactaatgggtactagacttaattcctggatgatgaaataatctgtacaacaaacctccatgacactgtttacctatgtaacagacctgcacatgtacccctgaacttaaaataaaaggaaaaaaaagaaaaaagaaaaaggaaaatctcgtggaatctactaaaagcaacgaaaaagaaaataatgtatcttctgttgttgggtggtgtgttctataaatgttgattagatcttatggtttgatgttgtttattcttctatgttttttctcaatttttgtctatttgtttaatcaattgttgagagaaaactattgaagtcttcaactatcattgttgacttgcctattttcttttcagttctatcagtttttgctttacataatttgcagccctgttgtttggtgcatacatatttaagattgctatgtctttttggtagatttacccttttattattacatagtgttcctatccatttctagtaattttctttgttctaagtttatttgatattaatatagcctccctttattattttttgtctgatatatgtttttctatcctttaacttataaaccgcctatatcattatatttgaagtgagtttatcataaacagcaaataattgagtctttttttttttttttttgagacggagtctcgctctgttgcccaggctggagtgcagcggtgtgaagtggtgtgatctcagctcactgcaacctccacctcccgggttcaagagattctcctgcttcagcctcccgagtagctggggctacaggcttgtgccaccacagctggctaatttttgtacctttagtaaagatggagtttcaccatgttagccaggatggtcatctcctgaccttgtgatccacctgccttggcctcccaaagtgttgggattacaggcgtgagccaccgcacctgacagagtcatatttttaaatctattctgccaagctctgtctcttaaaattgatgtatttaggcgatttatatttcctataatattgttatgtccaggcttaagtctgacattttattttctgttttctgtttgttctctctgtttttcatttctttgttttctttttcattgcttcctaaataattttaaaattccattttaatttatctatagctgtgtgtgtgtatgtgtgtgtacctctttggatagctcttttagtggttgttctaggtattacattatatttatgtaacttatttattgtcattaattaccagtctgagtgatgtgtagaaatttcttctctctttgtttaccctccctcatttataattgcctgtaatattttctctatatacatttataaccatatgatacagtattatacgtttttcttcaatcctataatttaaataactcaagagaagaagtaaagtccattttttaacccatattttttcttgccatgttctttcttccttcctgatgttccaactgtcctcaatttaactttttgtttttttagggtagacctgttagtgacaaattctgttagttttccctcatctctgtatgtcttaatttccctggatatttttgctgatatagtgttctaagttgatatttttttttcctttcagcactggaaaaaggtggtgacctccttcgggcttacacagtttctgatgaaaattttgctctgtcatttttttcacctgttagatgtcatttatctcactgctttcaagattctttttatctttaatttttagttaattactatgattttggtgtggctttctttgggtttgtcctatttggggttcactcaccttcttaaatcactaggtttatgtcttctgccaaatttgggaagttttcaaccatatttatttgataatttttttcagcttcactctctttttcctctcattttgggactctgagtacatgaacattaaatcttttgttatagccccatgggtccctgaggctttgtccattttttccagtgtattttctttctttcttttgttcagattaagtgattgctattgctgtgtcttcaaggtagctaattctttcctctgttctctccttctgctgctgagcttatttactgggctttttattttggctattgcacttttcagttctaaaatttccacgttttcttccgtatatatcctatttttatgctgaaacatcctatttttttcttttctgctcttttcttcttctttctttttttaaaccactgaactggacatcctatttttttcattcttttaagtgttaattgctcatcaaagcattttaataatggtggctttaaaatcttcatcaggcttttctttccgttttggcatctattttattgtcttttaaaaattcaatttgagatattcctggttcctgatatgacaaataatttccaattgaaacttggacatttcaggcattatgttataaggctattggtcttatttaaactgttttagctggcttcttttaacacctctccagcaggtaggcaggtgagcttcatgacgccaggtaggggtaggagtccaggcttctcactctgccttcattgacacctcagataggtccccattattactgagtggggacagaaattctggctccctattaggtgcccactaatacctccctggttggttgggagaggagtgccacttactatccctcacatgacctttattgacaccaagatgggacagtggagtggaggagtgagtggtaggtatcagggagtggttgctggattaactctgggtggtgatgaaaatcctgactctccattaggcattgtctgacatcaccctagaggagaggggaagagatgcttcattactgttgggtgaggaatggaagtctaggtttccattgacatttcaggggcttggggaaaggagtacattttcaccaagagggcatgaccatcctgactccctattcactttctctgacaccatcctggtgtgtgtgcatgtgtgtgttgaagtgttgggttccttatgacagcctggtgagggtgaaagtctaggctcctcatttgaccttagctggtgggggtggagtcgcagttttttctgtggtgtttggctggccccattacccaagatggagtgtagtggtgcgatcatagctcactgtaacctcgaactcctgggctcaagtgatcctcctgcctcagccttcagagtatctaggactatgacacatcgaactatgcctgactaattttattattattattcatagagacagggtctcattatgttgcccagggctggtcttgaactcctggcctcaagcgatcctcctgcctggcctccttcccaaaattactttaaatgatataatagctgacagcttgaataggtcctctttattttgttggaggcagagtgttagaagtgacctaacaaaaaggatttgtttcttgtcactagactcattcactgtgtcaatgagtgtgtcagtggtttgtgggaagcaaacttaaatgaaaatgtatatttttaattaaatgttatgagatgctttttttaaactattggctcttgtgaatttcagaaaaatattgcaagtcatttgacttagctacttagcttgcactctatgtaaaaattttagaattttacctctttgaaaaactcctaatatcaatagtgatattgttgttttgcagcctcaaatgattttgttactttggactaattttcactgagctagttaataagtgactttttattgtctaaaaaattcttaagtgtatcatagagagaaagattattgggtcactaagtggctttctatatatatacctttgtccatatttaatttttgcaaaactcaaattaaggtggtaaacttagtgtggatatacattcatgtattgtattgataagattaactacgttttaaaactaaagtggaaagttttaaacaaaattgtcattcaactatatatgtatttctgtaaaacacacacgtaatgatgaattcgaattaataagcaaaaaaggagaggatttgtaatttaaaattgatcttggaatatacactctacacttaagacagagaaaaaactttttctttccctttagcataatctgcccagctagcggtggtttcttatcagaatgctctcacttaataccttgataacttttagtgctttgtgctgatagcatcaagtttttaaattattttaaaaacaaacaacaacaaaaaaccatttgcttctgaaacacctaaagtttcttataattgttaccttctttatgtttattttcaaatgttttattgtcactctggttattgagatatcaaagttataacaattgctcactctcaggtacctatgcacttaagtgaccagtttctctgaaaattcttttttgttgttgccttcttccaacctcataccctgaattcagaatactaacactgtcaagctatttttcacgcccccaaatctttgttttttctcactagacagccactacccatttggccactaggtggcgcaaaaggcttaatttttcaccttcctccgcctactgtgaaggaagctaaaagtaattagatgtgtttggcatgatttttatattttaaattaacgctgtactatcaaaagaactacctgtgtctcaaacccacaatgtggtaaaagctgacaaataaaaaacagtagctcaattttctagattaattttgtccaggttaaaaatattattgatatatgttttagtgaccacataggtttcagtaagggtaaaaggatgctcttgttcgtactccaagtctggcatggtgactgtcaatacattcattttgaagaagattttgcttctgggtttagccctaaaacaggccaaatagagacgataaaatgagtggaactgaattagagcatttctgaaaagttttatttggttaattctgccccttaaggtcagaaattgtgtaggaaaagtgtttcaaaattataaataaggcaaaattgtacgtgcttgattattttatatcacacttgaacctttgctcataattctgcctgatcaaaaccagagtgtttcagggattgtaatttgcctaagacgaacccggccagccctgtgcgattagaggttaatcagcagagagctgataagggatgctggctttctctttttctccggtaaagaagataacaccaaggttatgattttattgccctctagcacgttagccattttgaatctctagcctagaaattatttcctcacagagagatacagctctgtttttcaaatactctttggatcaaggctcttgtattcttgctggttccctctttgagtttgataaaactttgaaaagtctaccaaagaaatttctctcagaactagactttagagaggaaatgctggaactacggatgagaggcacatgtatgtacagggtcagaccacgcagagagcaggtctgatgagccacaccactgctgctgccccatggcttctagacgctgctgttggttctgttgttaggacctggaggttgctgcagccaccactgaagacacctcctaaaccacttctgtttcaggaacttcacttaaaaaaaaaaaaaaaaaaggaaaaaacccaccgcttccccaaaagacagttgcttcttctgtcacctttgccagagaaataaatacagtaaaaggtgctctgcaacccccacaccctggttcctcctgtggcccctttgtaactgaagtcttaggtggatgaatttaattggtggaacttaggtgctctagcttcaaagaaggctaggggaagtgagctttctggtttccactttagggaggcaggactcaaaaggtaggggaaatttcacagtactctaaaggtgttcaaatcccatgggcagccagtaaacatcacaggtgtgaggtgctgggtggagtggctgccgtgaatatgtgttttggttcatggactacatcagtggctcttaaagtccagtaattcacagattcatgagagataataaaatgattatttttgttttaagccattaagtttggagttggtgtgctgcccagcaatagataatggaaacatacagtatgtatttctgcaagtctggcttcttcacttaatattgtttctatgagattcgtccatgttgttacattttcagtagttgatgaagtttcattgtttacatagtactgtgttgcacgaatagactacgttttgtttatccatttactgttgaagaaccattttgttaaacaatttgagagtaatctgtggaaattatgccacttgacccctaaatattttgtcatgtataatttaagaataaggacatttctcctgcaaaaccctaatactgtcatcacccccaagatacttaaaattgataccatattatcaaacacacaatccatattaaaaaatcccctattgtcccagtaacaccttatagtaaatgtctgttattttaagcgggtgtcattcattacatggcaataggtaactaatacggtgagtctgcttcttccagcaaggaccctcagggggtgcggtgattcatagttctcactcagacttctctgtgtctgctcatatgtccctatttcatatctcagggtccggtctatcccaaccaggggtcttgccttatcacaacagctgctgttggatgatgcaacaaacatttctacaacttcataacctttatcataagcccccgggcttgaccctcagccatatctgtgctgggttgcaggagaaaagatagcctttaaaactgctatagaggcatttacagtttttcattcatgtcttgagtttggattaaaggcttttaatttgtctttttttcctttgtatgctcttgagggcagtctgacgcagccagtctctgaaggttggcacaaaagcctccatcgagtcacccagcttttgcctggtacctatcctaacctaaaaccttgccacatgttaccttggcgaaaggccagtgccacacttcagtgatgattcggctgtcctacttggttagaaccgagttcacttccttcctcaacactcctgccacattgatctggaagtttcaccttgagccaagtgatagttaattttatgtgttaacttggctaggctatggtttctagacatttgaataccagtctagatattgcagtgaaggtattttttagatgagatttacatttaaatcaatagattttgggtaaagcagattaccctccataatgtaagtggcccttccaatcagttgaaggtcttaggggcaaagactgaggtcctccaaggaagagggaattctgcctctggaccaccttcagactcaagccgcaacatcagctcttcctgggtctccagcctacctgcagatttcgaccgtgccagctcccacagtagtatgagccaattacttaaaataaatctctctctgccaacatcctattggttctgcttctctggagaatcccgactcatacaagccactttctatagaaggctgtttcttcgagaaatccaccctcttctatgtcaacagagtttagaatctccatactttatctcttcatttttgagaacataaattctgtattacacatacttatactatactatatatgaaactttcataaacattgctgggcaaagttgaatattgctgaaccaatttccgatgcttctgaataagttcaatggagttaaaacatttttcttcttacatggtatgtccagtgccccagagccagcagagttaagaacttggtaaggaagaccaaagataatccatatattctagtttgttatataatataaaacatgtttattagattctaaaagacataaaaagaaaataatacatatgtatcagtgagagaggtgcaaattaggaagagaactaaggattattcttaattcctgccttcctttctaaatcccaatcctcaattgaactctttaattatatttcctgtttattttattgaatggaaaaaatggaaaattatctaacatttgtcatggaaatataggagaaattactctcagagatatgatgttatttaagtcattgacatattgttaacctcagatgcaaatggtggaattaataatattcctcagttcatggtacatagtcactgttggtctagtgctagtttgtagttgtatttgtattttttattttttagaaatacggtcttcctttgtcacccaggctggagtgcagtggtgtgatcacagctcacagtaagctcaaactcctgggctcaagcaatcttcctgccttggcctcccaagtaggtaggactacaggtgcatgccaccatgccagctaattaaaatgttttaaatttatttttggtaaatggggtcttgttatgttgcccatagtttttagtgctatgataagctagtaattatagtgaacattcttgtcttggatacccaaggtttttccgttatgtatactagtggttacagattttttggattataacctttgccaaaataggaaagttttgattcctgcttccttaactgtttttcaaaaatcacaaatggatatactttaccaaatgtcttttattaatagactgagcaaaggaaatgacttttctatgaatatggtaaattatagcaacaatatgttttattatattgaaccaccctagtattccaaggattccctatttgatcttgatgtatcattattagcataatcattattattattgttattattatacatatttttagagacagggccttgctctgttgcacaggccgaaatgcagtggtgcaatcatagcttactgcagcctcaaactcctgggctcaaatgatcttcctgcctcagcctccctagtagctgagactacaggtgctcaccatcacacctggctaattttttaattttttgtagagacaggatctcacaggatctcagtatgttgacaatgctggtcttgaactcctggcctcaggcgatcctcccacctcggcctcccagtattattatttgtaatattgttgaattcggttcataaataattatttttttctcccatctgtgttcaaggtgaaatgggtctattatttttttttccttgagttttccacaactcaatttggagtcaagattacactcggctgataaaattagctaatcaggtttagtttttttctgttttctggaaaaagtatataatatagaagtttcatgttccttgaatgtttgatagaactcatctgtgaaaccatctgggcattttcaaaaatatatttttttattagatgccattgataactttaaaaattgctttaatactcattggtatagtcaagttttgtatttctttttgtgctaattttgatagattaaatgtttctaggaatttgcttatctcacctaggttttcaaatttattagcatatacttgttcataacactctatgctttatatctgtgtcatatctgtagctgttccccctttttcattatgtatttgtttattcattttttctccctttatccataatcggccttgttgtaactctgaatatcttacaaatatttttaagtaagcagcttttggaatcaaaagtatgttaattttcactacctagttttttgttctctatttctgtttcattgctttctattcttatctttataactccttttcttcgtatttctttaggtttgctcaacttctctttttccaaatttttgagtagaatttctaggtcctttattttaacttttcttgttctaataaatgtatttgaaattataatattattttatatgtatattttatgtgtaacatttttaacacctggttctaaaagagttaattttctttataactgctgtttatttatttgacacagggtcccactctattgctgaggctggagtgcagtgacgcaatcatgcctcactgcagcctccatcttctggactccagcgatgctcccatccacgactgccttttaaatccatgttactgataaatatatttgttcacttacaattttaagtatattttagttatcaagttctaattttattacagtatggttgcagaatatagtttctttctttctttttctttttttttttttttttttaagacagtgtcttactctgttgcccaggctggagggcagtggcacaatctcagctcactgcaacctctgcctcctgggttcaagcgatcctcccgtctagccttctgactagttgggattacaggtgcaccccatccagctaaattttttgtagagacggggttttgccatgttgcccaggctggtctcaaactcctgggctctagggatctgcccaccttgacctcccaaaatgttgggattacaggcatgagccactgctcctggcctagaatatagatagtttctaagataccgatactctggaatttattggcgttacctttatggaatgatgcatgtcctatttgagtaaatgttctgtgtggcttgaactattatatataatttttggttttctggcaacttttaaaaaatgaattttatgaatcttgtacctcattttatttccttctttgctttcactatcctatggcctggagccaattattttttatccatttatagttggctgataaatatgtgtcctgttaaaccggctctctgaagaaaaacaatgcttctgacttgtagcattgctgatttctatagtataaatacttccatagtggtcaatatcaagttaccaatagttaacaactgtcttcaaaaatcctgaatactttgcagtctgctcttgctagccagtataagacagcgcaccacttttttttttttttaagatattcacgttgtccattagtttccattagtttcactccttggcttcacttacttttcttaaccatattttctctctgacccagtgttgttttcttcttttaaaaattgttttaaattatctctgtaagctgctacaaaccttttattggaatgaagggcattagaacagttatttggccaatacagaaaaatgaagtcttctaattttttttttttttttttttttgagatggaatttctctcttgtcgtccaggtggagtgcaatggcgcaatcttggctcactgccacctttgcctcccgggttcaagcgattctccctgcctcagcctcccgagtagctgggattacaggcaccatgcccagctaatttttgtattttaagtagagatgaggtttcaccatgttggccagactggtcacgaactcctgacctcaggtgaaccacccgccttggcctcccaaagtgctggaattacaggcacgagccaccgcgcctggccgaagtcttccaattttaaaagatctaatcttcattcagttctcaaagtctttgctgtgcccttaaggcatgtcacacgcatgtgcagctcaggggtaacctggtactcctgagggttcagactcagaattagggaatttccgcctgtactctcagtttggagattcccctacacattcctgcccgcaggggccctttttcttcattcctctggccagaaagccggtatttctcttgttaactcagggcttgtgctaccacgcagtgcagctctgcacctgaggcctgacgtcagggcagagctgggaggaaaaaaggggaaaacattgaaaacccactccccaggaggggcccctctcccagttttgaccctcttcacaatccacctgcttttgtttactttttggagtccttgagtacttgctttttgtatactgcccagaatttctacttgtgatcagtgggaaaaatgggctatttaaaatctcaaataagttaaatatcatggctagaaacaactccaggcatttgtaattttagatttttttctttacactccagggggatgtgattgttttagagttttgaattcgtatgtttagcctgagatcctactagtatttctgttgaatatgcctgttgactgcccacttgttagcaaaatggcattgaatgttggaactgtaaactaccttagaaatcattcagcaccatcttttgacagaaaaggatatgagagttcactcctgtcactcaggaagtgcaaggcaaagatagaagcagaattaaatttgttttaatacagttactcagccatctggtaacagtttcctaagtgccaacgaatgtatggggctatttattgcagattttaagatgatatatggggattgagggaatgagaagttttagggagtggtagaggaagggcatataataagactgaatcccagatcccagcctcagaacttattttgtgaccttggtcaagtgatttaatctttccaaacctctatgtgtcctatagaagtaataataatacctatatagggttgggtgttttttttgtttgttttttctttttcttttcttttttttttcttaagatagggtctttctctgtcacccacgctagagtgcagtggcgcaatcacagctcactgtagcctcaaactcccaggcctaagcgatcctcccactcagcctcccaggcagctgggactacaggcatgcaccaccgcacccgactaatttttaaatttttttgtagagatggggttctcactatgttgcccaggctggtcactaactcctgggctcaagcaatcctcccgccttgacctcccaaagtgctgggattacaggtgtgaatacagggggttttttggtttgaattttaagagataaaatttataaaacatttagccaatgccacaaatgtagcttcttttggttattgtcattattctttgaaattcacaagtgccccaaaatatttaagcatttttcatgtattgccctttaatatgaatgaatgcattatgaaaggaattcttttacatgcgagtttgctgatagtcttagctaattctcatgtgtgtaggtgtcttgcctatctgtcagtcttagccttaaaggaaagagtcccatcacctcacttgcggcctcatcatcatggaccgcatgatgatgcggaatgagaatttttattgtttgtactacttcaaaatcattcagtacgtgatcacctgtcatgtatagggctctttatatttctagtttagtcccttttgttttctctaggaaagatgttttagacctgggacaaaagaagaaagagtgtatgctgacatctaggagggaagcacccacctcccctaagctccatctccctgagcactcatttcccaatgaccataccaggttttggccctagagagtttattacaaaataagaaagagaagtctggggaaggttcactcatcatagaattttggcagttcattgcccaagatgactcgatggtccacaccggcagctgtaatagtgaccaggtagatgacacccccgcttgagccatcccggctcatggccagagcaatagctgcagagggtttcaagttggagagagggagagagaggatggcttagcttcaaaaatctttttactccccctccatccatatgcctactaccactttcacctcaaaactcatcttccaggaaggcatatttagtggtgtgctggtaaatcagtttttttacaaaaaggcttccatatgtggcatctgctgatgtccgtggtgtaaatgctcccgctatgatgaattgcaagttacaaatagctaagcagttcacaaatccttgactatttaacagtccgctctcatgagtggtcccaagccagcctcagcacacctcagcacaccactggttctttttttttttttttttctccagacagggtctctctctgtcacctaggctgcagcgcagtggtgcaatcaccgctcactacagccttgatctccccggctcagatgatctttccacctcagcctcctgagtagctgggactacaggtgtgcaccactatgcccagttcatttttttttttacttttttttattgttttttgtggagacagggtttcaccatcttgcctaggctggcctcaaactcctgggctcaagtaatcctcctgcctcagcctcccaaattgttggcattacaggtgtgagccactgtgcttagcacaccactggttctcacagtgactgtgtatcctcatttgatttactcagaacagccctggtttatccgtattgcccaagaaccccattgagctttgcatttgtcctgccccttttcactcttaaaagtgtaccaggcccggcattaacttaaatggccacccctgtatttctcttcctgttcctcataatctacttccttcccatgtttcaaagccctccccaggtacccttccacttggctggttaccgtctgtggtgaagcgcctgcactcctcgggagacatgcctggcttatatgctgcatccacataaccatagataaaggtgctgccggagccaccaatggcaaaaggctgtcgagtcagcattcctcccagggttccatatacctgggaaagggatcctcaggttaaagaatcatcaagcccttccttcccactgagacattaagtggtctctgcaccctgcaatgaagccctggtatctcatatccccaaagtactatgctttcagaggtagtgtccttggaactcattgctagaatgacataggacttccatcttcctctgcaggagagtggggaagcccagaggagagagtgctttgggagaaactcacctgacctccttcacgttggtcccagccagctaccatgagatgtgcagacaagtcctctcgatatttatagctgatatttctcaccacatttgcagcagccaaaacaagtggaggttcctccagttctatcctgagggaaatattaggaataaaggttgatagaattttaagtctcattctcctatactgttaccatcatccctgctaaacgacccctgaaaactgtaactgcaatagctcaaactgcagcctccctcccacatgtacaggggaaccagagtcccacaccaccaactggtaagaagctttcaattgctcactcttttgctcagccccacccacataactttcttttggctgcaaggaccctgctcttatggggaaaagcagataaggttacttccgtcccaacgaccttgatttctcgtatggtaactgcctgatattatggtgggtcacaatatcaccttcttcctgattatttatatcaggatagtgatttacagcttttaaactgtgttcacatatagaatgtggttctcaaaataaccgtctcatgaggtactatattatctccactttacagatgcagaaactgacagattcaagtgccagcaagagccgaaacaagacttttccatttcccagtgtccagctcctggaacagcacactgtacagggattcatgcaggttgggggagctctagtgggtggggagtcagaactccagagcttcatacccatggagctccagctggtaggcggccatgtcggccacggcttgggcatcagcagctgaaccagagagtgcacagtagatgcgctcgtgcagcggggacagcttgtcaaacactcggttcaccaccgcctcgctgtcaggagggagtcaacagtcaccaagttaaaactcaggttttttttttttttttttttttttgagacagtctcactctgtcacccaggctggagtgcagtggatcaatcttgggctcactgcaaacttcgcctccctggttcaagtgattctcctgcctcagcctcccgaatagctgggattacaggcacccaccaccaagcccagctaatgtttgtattttcagtagagacaaggtcccaacatgttggccaggctggtctcaaactcctgacctcaaatatctgcccacctcggcatcccaaagtgctgagattatagatgtgagccactgcacccaaccagaactcaggaatttttgagggtgatcattcaatgtctctcaaatttctttgacaagagaatagcatgaagtttaatgcttggattaaagcaggaggcaaataatcatctcagatattattaatcactgcagatgttaatcaaaattaggcttatttttcaggcttagattttataacaaagcaaaaaatgctaaggtaagaaaaatatgcctcatcaattttctttgctattaacaatcttgagagagttatgttctatggaacataatgtcagtaatattgacctaaccccatatactcattttgcatgtgaggaaattggttaggagtgggagaagagacaaaatagttcaatatatggtaaatgagaaaccaggtatctgcttgacagaatcatctttttgatccctaagcacagatggaaagaagaccctcaaaaatctatctcctgtccccctctcagaccctattcctttactcatccctgtacactactgggacaggtcacatacacattcagaccccagatcctcctccacaaattcagagacccaagcacccaccaaatagcttatcatagtggcttttggggaaggtcaactccattcctccaaggctccagtttgccagtcttttcatgaatgggtaaggaaagtgtgtatttgaggccattagcttctttccaaatgcatacatcttcacttttactcaccctgcagacactcgggaatcagaacccatcacaacgcccccgtcaaactccactgccatgatggtggtctgcagagacacagaatatggaatgtcagggcaagaacagccttgatgccctcatgttagagaagaagaaacattcccagagaggcgaagtgactggctcaaagattacacagtaacaggccagagctgactgtcagtacaggctttttttcccttcatctttccactttctctattgcttcatccggctgcaggggaatgccacagcccagctgtgatacaacacagaaagaactgtgtccctaagttccaacttgcctagtggaatcctctccactgtagagaggtggagatgaggctcctacaggtagaagtgaagcagctccgcaagtgaaaattatctccaacggaagggctcatagtatgtgcagatgtggtgtagacccaacacagagtaattgactatgatcttgggaaacaaggtcagtctatttttttttttttggtccacaatcctccactctcaccccccatttcatcagaagtgagctcttccaatttactgaacattggaaaaaatcgaggagggcagtggttagcatggccaggggcaaggcaggagagaagcagcaaggaacacatacagatggttgaaaataaaagtttcagttatggaatttccgatcaagaggtaaatacatatctcagcagccagggaggtaaatttgtaccaagagataatttgactgagaagtttaagctgacttttccaggtcaagaaaagaatcaagaagaagtgagggaagataaagctacatttattctactattgagttggaaggagccttaaagatcctcggttcaaatgaggaaaccaagtcacagaaaatgcaaacgacttatgcaaagtcacacagagttaatagtagacctgggactaaaattcaggtctaactcttatcccttgtttccacttctacttcctacttgccactgctcatttggcagtgaggggagatttcccaaattataagtggtttcactgtgtctttcttaccaggccgtaagttactctggccccaaaggacgctcctctgagtatgctttccgacggaccgacttatcatgaatagagggtcaaagaacagggttaacttcaagttagaggctattcctctctaacaaagccgcccccaagccacgagtggtggcagtagtccagagcagaagccagccagccagtcttggggctgccatctgccccaggcgcccatcctaagcaaagtccccccagtgggcacatgggagtgggcagggaagacacagggaagggagtaaggcagcatctgggccaaggagaggccttcctgggtcaagctagggaagggcatcactagttaacacagaacgcccattatcagtgcttgggctaagagttgcccagtggcaagtttatcaaaagtctgtgtgatgagttggtccttctcaataagtgcctatatttccttctcccaagtgctgttctacttcacccagggcaccatttcctcatctctttgcaccatccccaaccccctttcttgatttaaccagcccccactgtccgggaccagagtgaaagcgaaagcgctttagagtagcttcccgttgacgcttccagctaagagtcaaagcacccgctttttccaccagcctcgcgtgcctgttcccttcacggacactctagacgacccccctcagaaaagaaatactctatgctcattgcgggttgcaagcgctggctgctacaggcgacctccctgcgctcccgttggtctctgcattcacttctccgcgcgcgcttccagggtcccctggccgctgcatctcctccacccctctgccaaccctcaagcccagacccattaccccggtgtggacttctcccgcccggggtaagtccccggttggtgctcccgcccgcagcatccctgcaaggcaccgctctcctcgccgcctggggcactggtttccaacctgggacagcgcacaacgcgcagccgacagccccgccccttcgcggcgccgccaggaggcgcctgggtgctgcggggctgctttgcgcgcggcgctaacgtgtgtagggcagatctgccccgagacaagtgacgaggcagccccgccctgaggctggggtgggaaaactggtgcaagtggaaaggcaggaggcagggagaggcgagaagggtgtgcgtgatggagaaaattgggcaccagggctgctcccgagattctcagatctgatttccacgcttgctaccaaaatagtctgggcaggccacttttggaagtaggcgttatctagtgagcaggcggccgctttcgatttcgctttcccctaaatggctgagcttctcgccagcgcaggatcagcctgttcctgggactttccgagagccccgccctcgttccctcccccagccgccagtaggggaggactcggcggtacccggagcttcaggccccaccggggcgcggagagtcccaggcccggccgggaccgggacggcgtccgagtgccaatggctagctctaggtgtcccgctccccgcgggtgccgctgcctccccggagcttctctcgcatggctggggacagtactgctacttctcgccgactgggtgctgctccggaccgcgctgccccgcatattctccctgctggtgcccaccgcgctgccactgctccgggtctgggcggtgggcctgagccgctgggccgtgctctggctgggggcctgcggggtcctcagggcaacggttggctccaagagcgaaaacgcaggtgcccagggctggctggctgctttgaagccattagctgcggcactgggcttggccctgccgggacttgccttgttccgagagctgatctcatggggagcccccgggtccgcggatagcaccaggctactgcactggggaagtcaccctaccgccttcgttgtcagttatgcagcggcactgcccgcagcagccctgtggcacaaactcgggagcctctgggtgcccggcggtcagggcggctctggaaaccctgtgcgtcggcttctaggctgcctgggctcggagacgcgccgcctctcgctgttcctggtcctggtggtcctctcctctcttggtaaggggaacgcagggcaagaggggaggacacaaggggactgggacaggaatcaaaggtaattgtcagtaaggtagagtagcgtgggttctgggaaatgtggagcgggagaaggactcctagcgtgggtcttggaacaccacttcggtgtagaagaaacggcactggactggcgggggccagaggttctgggctccattgctgaccgggtcttgattctttgggccacgccggaagcggggaaatcctttgctctggggccgaagggcggggcatcctcatctctaacaggaggcttttctacttcatgatctccagccttcctaataaaatcctgaaagttctggtagagcaaccacagggtagtgagttccagggcagcctatttaggttcgggattgagacgtcagtgtttcctttctgctgatgccctccaggataatggtgagggggaggaggcgtggtggggccagtctgactggaactgacctacttagacttaatatttgtgcgtgacctctcttctctttctccaggggagatggccattccattctttacgggccgcctcactgactggattctacaagatggctcagccgataccttcactcgaaacttaactctcatgtccattctcaccatagccaggtctgggggctgaaaatggggcaccctgcaaatgagggagttggaagttggggctgctgtccgaaatgcacttatatggggatacctgggaccttcagtctgttccctgaacacaccctgatcccctttttttccgggttctttatagtgcagtgctggagttcgtgggtgacgggatctataacaacaccatgggccacgtgcacagccacttgcagggagaggtgtttggggctgtcctgcgccaggagacggagtttttccaacagaaccagacaggtttctcctgaaactctttcattatacgccatgtactgttcatatcctcatacatctgctttgatctcccccctccccgctctctctctctcacacacacatacacacattgttccttctcattcttgatataccctctccctgtctctctctctctgtctctgtctctctctctctctctctcacacacacacacacacaattgtttttctcattcttgatatacctcaggagcaaaatattgtcctccttaccttaagaaaaacctagagttttcatctagcattttcttataaatctattcctatgtatccttagatagaaaccatagaatttcaaacctggaaattttgagctcatagagaccaactgcctcatctgacagagaaggaaactgaggccaagaccctaaatgctgaaactgcacagttacatatggctagagacacacttggggttagaaccctggtctcttgagtgctccacagacttcggcatgctttctagcagcactagaagctgtacagttacatatggctagagatagacctggggttagaaccctagtcccagtgagtgctccacagactttggcatgcttcctagcagcaccctcctcctccatctctgttatgtgaccagtttaagctcttcctgcctgtgtgtatagcatgggacatacaggttctctagggaacagaaagctttcaggaaaatggaaattcacatgtgcattaatgactttataattaaaatgaaggtcaggcctttcctctttaacactcatcttccctgcactgagatttgcagacctctggagaaccctaaccttgtttcctgcagcctccttagaaccccatgttgacacccctgaccctggcatcctggctcattgttagttcgtctcatcacttggaacctgtctgattcacctcactctcttctccccaaccctgcaggtaacatcatgtctcgggtaacagaggacacgtccaccctgagtgattctctgagtgagaatctgagcttatttctgtggtacctggtgcgaggcctatgtctcttggggatcatgctctggggatcagtgtccctcaccatggtcaccctgatcaccctgcctctgcttttccttctgcccaagaaggtgggaaaatggtaccaggtatgttcatggagttggcccgctctacacagaccctcatctcccagacttggcagactcagttcctctcacattgctttcagtccagctttcctggcacccttactgattctccatcttcatggaacaccctgtccctgtggtccatgttcccaggttgctcaacattaacctccatactctctgggtcttcttttctagcttctccccacaatctgtctttaagaatttgatccccaacccgttctgagtcattttcctcttcctcgtatttctttagcatccaaggggcatagctgtgtctctttctcttttctccttttcctctgtctcttctcacctttaatttccaaataggtaactcaggtattagtgtccctgatggtttgccaacccgtgtgacatctcttgtccatgtatccacagttgctggaagtgcaggtgcgggaatctctggcaaagtccagccaggtggccattgaggctctgtcggccatgcctacagttcgaagctttgccaacgaggagggcgaagcccagaagtttagggaaaagctgcaagaaataaagacactcaaccagaaggaggctgtggcctatgcagtcaactcctggaccactagtgtgagcacctgaagatgaatacccattcccttgtccttaagatgccgtgactccattcccattcctatgaccctgctcccactccttctttactgggaaatggttggttcagtattttcgtcctagcaacctgaggctcaatgactctactcagtgtccctagccccctccctctctttaaagatgctaggtggcttcctttcagtatggtacataaaatccacccaaccatgtggattggagagatgcgtgtcttccagtcctagggccttcctttgcctctcaggggaagtgcagggcgccataaattcttgcacctgggactgcttcatgctggtaccttgtagatttgttagtgagagtgatgggaatagtggaagccagggatgagggacatctgtgatgcactggaaagagagctacgccagtgatccgaagatcctggcttgatgatgcaatttacttgtcttgtgatcatgacaacaaatttaccttctctgagactgtttcctctttatttatttatttgtttgtttgtttgtttatttttacttattattattatttttgagctggagtctcgctttgtcgcccaggctggagtgcagtggcgcgatctgggctcactgcaagctccgcctcccgggttcacgccgttctcccgcctcagcctcctgagtagctgggactacaggcacccgccaccacgcccggctaattttttttttttttttgtatttttagtagagacgaggtttctccgtgttagccaggatggtctcaatctcctgaccttgtgatccgcccacttcggcctcccaaagtgctggaattgcaggcatgagccactgcgcccgactggttgtttcctcatttttcaaaaatggagtgatataaccttctttataaggctcttcatgtattagctgacatcacatgaatgaaagccttttgtgaagagtaaaatgctccccagacaaggtgatagtggtgatggtggtgaagataactgtgacttgcatgatgtgcattgagtcagactccatggggtctctggttcattctcctgtctgcctattgagcctgccgatgtcacttaggagacagggacttgatatttccttcaggttaatgactgtggttctttgtgtcccctccagatttctctacctcagtccctttttttgtggtctctttatagatttcaggtatgctgctgaaagtgggaatcctctacattggtgggcagctggtgaccagtggggctgtaagcagtgggaaccttgtcacatttgttctctaccagatgcagttcacccaggctgtggaggtgaggtccctccaccttcactccccagtgtgattccttcctctggcccagcaccatctgtgtgatgtccttccattctttacccttcttgcttcacataatgctggcaagcagactacctcactttcactattcttacctccctctaggtactgctctccatctaccccagagtacagaaggctgtgggctcctcagagaaaatatttgagtacctggaccgcacccctcgctgcccacccagtggtctgttgactcccttacacttggagggccttgtccagttccaagatgtctcctttgcctacccaaaccgcccagatgtcttagtgctacaggtacaacctaccactccctgtattccactggccccaactgcaattctgccatcctaaattttcttcctgccttcagcctgcttactgccaagcatatatcctccctaaccctttaaaggcaatggtaggcatcatctgttccataaatcttccccaaactcaagaacccagtttgggcttccaaagagaatgagagaagaggtttcgaagagagtgctctcacgttccaaggaattgctgcagcaaaatctgtgtcttcggtcttccatctttccttttcctttgtaatttggaatgtgatttttccctttcctggtggtatctgacatcaagtgtgtggcatagtggtgctgggtctctgcccttgtctttgccgcttcttctatctctactccttggggaggcatcacccagaaatctgtgcatgtgggagggtaggagtttctatatttccctgtttttcttctggggtaagacatcatgctatgtaacaaggcaatgacactctcaaggttagaggccttggtagcctcttatcgtgtgcttctctggcctctaggggctgacattcaccctacgccctggcgaggtgacggcgctggtgggacccaatgggtctgggaagagcacagtggctgccctgctgcagaatctgtaccagcccaccgggggacagctgctgttggatgggaagccccttccccaatatgagcaccgctacctgcacaggcaggtatggaagcaggtggcttgaaggagggcagggagcatcaaatacgaagagcattcttactgagcactctgaaagaggggttagggaatgataagagaccttgggtggagatggtggtgtagtcaggagggaggtagtatgattttgtgacatgttctcaataaagattttgagtcttcgatctctagataaccatactcccatgtgccttgttctatgactcttcatcatatttcatctcaggtggctgcagtgggacaagagccacaggtatttggaagaagtcttcaagaaaatattgcctatggcctgacccagaagccaactatggaggaaatcacagctgctgcagtaaagtctggggcccatagtttcatctctggactccctcagggctatgacacaggtactctctccactcatctcaccacccagccatctttacctttgctgaaaccccagtagtcttgcctttatccttcagttcctccttactcatggacatcaatttgaagttgtaagatcatgctcctatggcttcttcatcctgacatcctcaggattctgttcatcttcccagaatctcccctatccagctacaaccgtcagatcttggtgtgtgtgagtgcgtgaatgcatgagtgtgtctgtgtgcatgtacatgcgtgcacacatgtggctataccgttctcatcttggccctttgctctgcagaggtagacgaggctgggagccagctgtcagggggtcagcgacaggcagtggcgttggcccgagcattgatccggaaaccgtgtgtacttatcctggatgatgccaccagtgccctggatgcaaacagccagttacaggtgaggcagtcatcttcttaatggctatatcccacccaatcttgcttcttttatacatcttctgttagttttactaacatcataattatacaaaccagtccttgcagttctcagttcccaaatccagttccattggatgcctccccaaggagtagagatagaagacgaggcaaagacacctagaatcagttaaaagagactatctacaaactacagactgaatttctttctttctttccttttttttttttaagacagtgtctcactcagttgcccaggctggagcgcagtggcacaatcttggctcactgcagcttcaacctgctgggctcaagcgattctcccctcagcctcccgagtagctgggactacaggtgtacaccactatgcctggttgacttttatatttttagtagagatgggtttcaccatgttgcccaggctggccttgaattcctgagctcaggtaatctgcccccctcagcctcccaaagggctggggttataggtgtgagccactgcgcccagtcctatagactgaatttctaaagcgaaacataaggaaaagaccatcctcataatatcgtttatttaaaaaaattattttttgtacagacagcgtcccgctatgttgcccaggctggccttgaactcctgggcccaagtgatcctccctccttgacctcccaaagtgctaggattataggcatgagccaccgggcccagcccatcctaatcatattaatattaattaagctagtctgtttacatgcactgtcactcatttattcattaggaatccttctgagctaggcatttatcatcattctacagatgacaaaatggaggttaaaagaggttgaataagctgctcatatagaggtcatatagcttttgagtggcgcagccttgacccaaattcaggtctgcctgacttgaatgctcatctctttactactaagttatatttccttaaaatcgaatataaaaatgccaagtccatgggtagagaagaggactattcaatagtctttattcttctgtcacgtgtttcaccctagggttctcatttttatcctacttttgcacccttcatgtaaaacagtccttaatgaaacaaagggtttgcggagaagtactcagaatgggaaacgttggtgtccttggggttgttagcagagccagcagtgatcctgtgaggtcagtcccagccctggaaacacaggtgtctccctgggctgagggtagtccccggctctgacggtccgatgtctttcctcaggtggagcagctcctgtacgaaagccctgagcggtactcccgctcagtgcttctcatcacccagcacctcagcctggtggagcaggctgaccacatcctctttctggaaggaggcgctatccgggaggggggaacccaccagcagctcatggagaaaaaggggtgctactgggccatggtgcaggctcctgcagatgctccagaatgaaagccttctcagacctgcgcactccatctccctcccttttcttctctctgtggtggagaaccacagctgcagagtaggcagctgcctccaggatgagttacttgaaatttgccttgagtgtgttacctcctttccaagctcctcgtgataatgcagacttcctggagtacaaacacaggatttgtaattccttactgtaacggagtttagagccagggctgatgctttggtgtggccagcactctgaaactgagaaatgttcagaatgtacggaaagatgatcagctattttcaacataactgaaggcatatgctggcccataaacaccctgtaggttcttgatatttataataaaattggtgttttgtactgtggtttcttatgtttccggcacaccaaacggcccactgccttttgcagcgcacttttcagctgcggatgtctcctcttttatcatcctcaatgttttaccccctaactgcatcaccttttcccttaagctttttaattcctatgaggccccttccacttcccctatccccttaggcccacccccaagaatgtgcaagaccccagccacagggcccatcagggcactagcggccgcagctcagagccgtggcctctccgaagtggcagatggggcgggcgcggccagagcaagtgccaggcgggaacagagggactgggcgcgcctcacaactcaccacctcgcccgctggtccttcctggctcgcctggctctgaagctgcacctggaggggaaacctcagaacagtaggcgggattgcctagtaaatatctcccattcagggaggcccaggtcgtgtgacgtcgacagttgctgggtagatgaggccaacacaggttgcaagaagaggcggggtttagaggcgtgaaactccgcagtgctcagccaagcagggagcaacgctaggaagggcgggcagaaagggcacgctcttgtgggtgactacaggttaggagaccgttgaacctggaggggccctaggatggaccccgtggaaagattcagagactgcgccctctccctggcgccgccttcccctacacgcggcgggtatattctgttgcagttggcccaggacctgtttccaagactctgccccctcgcacttccgtccctcctggttttgtaaagtgatgctcataggaacccccaccccgcgtgacactactcccagctcctggctgacttctagtcttctggttgaagctgcgcctttagatgacacgaccctacccacccctgtttccagcggatgcccgggcctggaggtacctcttactgtaacccatcgccaagtgggcttttgaaggcgcctgttcctttctcgctttcttcggaagacccttgacccatcattcccccgacccccataacgggagagcagagaagccggtccccagtgtgatggtcctggtccaggcactaactgtccttttctcggaaaaggcagggggatgtggaaaagagtcttgttccctccccttcgatctgtggctttcgctttcacttcctcctccgagagcggacagatctctgggtgctgggcggtcatggcgctactagatgtatgcggagccccccgagggcagcggccggaatcggctctcccggttgcgggaagcgggcgtcgctcggacccaggacactacagtttctctatgcgatctccagagctcgctttaccccggggaatgcaggtcggggcagtagggaagcccctagggatgcagggaggcgggcgctgaggagtggagggtcgcctgagaggaggaggcgagagcgggagcgcggggtacagggtcgggggtagccttcagtcccggagagcgccagacccaaagaagaggccacatggggatggggcctgagaggaggaagtgcaagttaggacaaagagttacaggtgaggtgggggctcccaaaggaagacaagagaactttcctgcccttgtccacacacaaatggtggagcctttttcatggggttatcacatgatataggaggtgtgtggtgtcttgggaaacctatgaaatttgcctgctggcctcctctcagcaactcactgttgcgcgacttagaacaagtcacttagtctaggtcccaagcccctcttctgtaaagtgaggatactgttactaaacgtgttttgtgagggttgaatgctttatgcatggaagaaaccctttaagtcactctcaaaattttttagtaatggtaacatgtgcttgctttcatttctgttgtgctggaaaatggaaaaggttgatactggcatgcctcttcttttccttctcccaagccatttccttctagagattggttattaactgtttcatttattgatggttagatcatttctgcatatctcctcaccctcatactccctaaaaccttttcctggagcctcttactacagaatttttcattgcctttctcaacctcttttctcttatcagcccacagaattcttccagtccctgggtggggacggagaaaggaacgttcagattgagatggcccatggcaccaccacgctcgccttcaagttccagcatggagtgattgcagcagtggattctcgggcctcagctgggtcctacattagtgagtgtatacgctccagcaggcagaatctggggagctgggctctcctttccacaggaggccaactctgcaacaaagtggaagtggatattgatttaggacacactgggggatctatggggtcatcccttctctcccaaagctccatcttcttccaggtgccttacgggtgaacaaggtgattgagattaacccttacctgcttggcaccatgtctggctgtgcagcagactgtcagtactgggagcgcctgctggccaaggaatgcaggtaagcgaggcctctcatcttcctttcttagcctagtggttaatccctggatctctcagatcattgctccttactcttgtcctatgtggtccatcttagtgctaatagtatatttcacaaaacagctttttggtgataagacccttctcccaaatctcagcctgtgctccactcataagccagatagtacgtcaggtatttagcactgacacatccaccctggcgggacagtatcatttactaggctgcctttgtatgtttcagatactttaaattccaaatctttctctgatctttagatcctacaaaataattcctttccaatgcttatctctttaatcatttcctgccccatcaagttggaaagagctaacctctctttcctcactccaccttgtcctcacccaggctgtactatctgcgaaatggagaacgtatttcagtgtcggcagcctccaagctgctgtccaacatgatgtgccagtaccggggcatgggcctctctatgggcagtatgatctgtggctgggataagaaggtgggtgctctccattcttcatgttcccccaccatgttccctatggatgacagatctgtttcccatcatatactcctactccctccctgacaagatgcatggcatatagagtgcttggttatagaactgtttcagtatatccatggactatttattggcccagatatgaatcattgcatgtgttttgtaagcttgtcccttttgttaaacagttgatttcaagtttgtttttcctttttcatttctaaagttcgatgactttaccaaagtggtttcctaattccaatgttcttgtggtaatattaattcttttgttcactttttatgtctcatatttgaacccccatgttaccaacatcttcctctccaatttcagcctgaaatctttcatcttatagggtcctggactctactacgtggatgaacatgggactcggctctcaggaaatatgttctccacgggtagtgggaacacttatgcctacggggtcatggacagtggctatcggcctaatcttagccctgaagaggcctatgaccttggccgcagggctattgcttatgccactcacagagacagctattctggaggcgttgtcaatagtaagagaccaatgctcccaccaccatgcctgggaggagtcggcgggtggtggggggggtgatttaagattgagaaaccagcctggccaacatggcgaaaccccgtctctactaaaactacaaaaattagccggacgtggtgacgggtgcctgtagtcccagctacttgggaggctgaggcaggagaatcacttgaacctgggaggtggagcttgcagtgagccaagatggcgccactgcattccagtctgggccacagagtgagactccttctcaaaagaaaaaaaagaaaatgattgagagactcaaaggagggagagtagtagggaggaaattttcagagtcagaagaagggcattaaaggcccagtcatatggttttaagcttgcgcatgtgtcttgttgctgccttcaacataacatcagtgacaggaacttgctgaggtgaaaggtgactccatgttcttttctcatttgtccacagtgtaccacatgaaggaagatggttgggtgaaagtagaaagtacagatgtcagtgacctgctgcaccagtaccgggaagccaatcaataatggtggtggtggcagctgggcaggtctcctctgggaggtcttggccgactcagggacctaagccacgttaagtccaaggagaagaagaggcctagcctgagccaaagagagagtacgggctcagcagccagaggaggccggtgaagtgcatcttctgcgtgttctctatttgaacaagcatttcccccagggaagtttctgggtgccccactaagtagaataaagaaaaacggttataaatacctctgtcttgtggctgaatggggttgggcctgtggttgttgggtggggcagaaagtaaagagacgctttttctggagaaggggctcagacccctatctaagaaatgtggcctcaccacatagttcttcctggggtttccttccacactcatctctccaagacctcaggaaggctgctcattgctgtccatggacacttgtttgcaatttcacataggttagggtcctttccatagagaggcacctggggactcctgtgtgttccattgttaatggtttgaggaacagggagtagggcacctaggataactgtttttgactttatagagtaggatgaaaaagcttccacttcactttaatatggtaatcatataaacaccataccatttatcccaaataacactttggagatattggatattgaatataaagacagacattaagggtctaatttcatgatgtgtcatgctgaattgcaagatggcaggactataattttagaggaagaagagatcaggaggactcccctaagtgaggagtgtggggaaaatgtaaaagatccaggttagaagaaagagacacacatcatgagattttcggaatcatgctggaactatggaccatgtcactttccagaaaataaaggaaacaaatgcttgaaagtaggagcatgagcttgagcatggagcttttttcattagagagagattcttaaaatgccagaatgaatagagttgtaaaactttagcgagcccctacttaaaatccctcctccccaccaccactattttaaactttaagtgactccttggtagtcacacaggtaacatttcaaaatggtgatctggaatccaagcgacccttcctttggggaatttgtttgtttgtttgtttttagtttgggaggtggtttcaatctgaagagtcctttctggaataaacgaatctttctgttgcataggaaggctctgggtcaggaaggatatttaaaaacctaattactgttctaaacagtgttaaaatagaacaagaaccaaagctcagtacggggcatttccctcataggctgaaggtgcgcccaacataatttggagtacagactcagaggcacctgaacacgcgccagctcaaggtgctccggctgagaaggacggatgaagatgaacgctcagggcctactaaattcaaagtctgtacgtgaaaatcccctttggcctggtgagattggttggaaccttctatttaggagagcccggctcgctcgcctaaaactggagcttgcatggaagagggcacttttttttttttagacgaagtctcactcttgtcgcccaggctggagtgcaatgacccgatctcggctcactgaaacctctgcctcctgagttcaagcgattcccctgcctcagcctcccgagtagctgggattacaggcgtccgccaccacgccctggctaatttttgtatttttagtagagacagggtttcaccatgttggccaggctggtctcgaacccctgacctcaggcgatccgcccgcctcggcctcccaaagtgctgtgattacaggcgtgagccaccgcgccggaccagaaagaaggcacttcttaatagtaggctcagagcttgaagtagtaactttgagaaaattcagtgattctccaattacaaagcattctccaattacaaagcaaggacaacagataaagttgcccttgagacaactgtattttacttaatgataaagaaacatttttgcagttttatatcccagagtaaccgccactaaaggcgagtgagactcattgcaggcctgtacagtgcgaaccagagttcgggctccagttccgctgtctgcgggtctcgcgcgccccctcccggcggcccagcccagaatgaaggccttggctggggaagcgaaagcgaaagctgcccgagccctgacgcccgccctggccgagcgtagctggcggaccagagccggtagcgaggttgggagagacggagcggacctcagcgctgaagcagaagtccccggagctgcggtctccccgccgcggctggtgagttggtgcggaggggaacctggagcgccaacagggacgcagcccaagtgactacccactccacgctcctgcttcccagtccctctgcacccggcgataggagggagcggagcccggaccacttagctcgccgcggcaggcgggggtgggggtgggggtccggggattttttttttttttttttttaagcacgaggctcctgatggtcatgcttccagctccccagaaggccgaaagctgtctgtcgtaggaggggtgtacggatgagcaccggttactcaggagagctctcagggttgaataggataaaatgagaagccgatggacgggttaggcggagccgggcgggtaggagggcagggacaaggattgggactccacccccatgatttctcatctcgtatccgttgacagagccatgcggctccctgacctgagaccctggacctccctgctgctggtggacgcggctttactgtggctgcttcagggccctctggggactttgcttcctcaagggctgccaggactatggctggaggggaccctgcggctgggagggctgtgggggctgctaaagctaagagggctgctgggatttgtggggacactgctgctcccgctctgtctggccacccccctgactgtctccctgagagccctggtcgcgggggcctcacgtgctcccccagccagagtcgcttcagccccttggagctggctgctggtggggtacggggctgcggggctcagctggtcactgtgggctgttctgagccctcctggagcccaggagaaggagcaggaccaggtgaacaacaaagtcttgatgtggaggctgctgaagctctccaggccggacctgcctctcctcgttgccgccttcttcttccttgtccttgctgttttgggtgagtcaggagaggacgttgtgagttggaggtggtaaaagggcctgggcaccagcacattcttgtgttatttttcatgcctctttcaggtgagacattaatccctcactattctggtcgtgtgattgacatcctgggaggtgattttgacccccatgcctttgccagtgccatcttcttcatgtgcctcttctcctttggcaggtaggtggtgggcagctgggtccatttgctagccccaaatctttataggggtcttcacttccctaactccatttctaggccctttcaggcgcaaaacacaaaaatacttaaactaaaatatggtgaatgtagtcaccattctgtttcatctatccattcatttcttccttcgttcatattcatccaatatcttcaaagtttatctgatcttattataggaacaagttatgagtgaaggtagtacaaaaggaatttaagtctcagatggaatgtctctcagttgtctctcaacattcctaggtccatgaaattccatttctttctgcctcctacctcctacccctaagtctgtctccaaagtatctctccagggtcactctctcaggatgggtatgcttctccctctcactcttctttcccagctcatcttgctaatccctgaagatcttactctgaggcttatcacctttctttccagaatcattactcttttcccttcacttgctttcctttctctttctagacatactcaaacaaacaaactgtttgataaggctgggactgggatgaggtgagcgaggcacctggggtgcaaagtttaaggaggtgtgcactcaccttacccaaatcccagccggcctgattgtctctatttttatggtcatacttaatttagagtaccctcgaaaaccatttcattgtgccttcattccatcctggctgctttctgctgaaactacagtcgtgcactgcataacgatgtttaggtcaatgatgggccacatataagatggtggacccacaagattataataccatatttttactgtaccttttctatgtttagatacacaaatacttacttctgtgttacagtcgcccacagtgttaggtgcagtcatatgttgtacagatttgtagcctaggagcaataggctaaactacatggcctaggtgtgcagtaggctatgacatctaggtttgtgtaagtacactctatgatgttcatacaacgatgaaaccatctaacgacacatttctcagaacacatccctgtcattaaagtacaaaccctcattatatcatgtctgactattccaaacgcctcttcaatatggtaactaaatttgtattagaaacatatattttgtaaaatacatgcttttatgctttatattttttcctctaagtgttactgtagcatgtagttggtctaagagggattttccaactcgaaggatgacagatgggaatcacatgactctggggctccagagaattgtgggggcagggaatttattattgcagttcccatgatgaagtatctatgatgacagagaagggctttgggtatggggcaggaaggagaccaaggcggaggagacgcacagagggacaagcctgagggacgctgggacagaagcaagcactgggatacttgttttcacaatatcttttcccttctattgtagttttctattgtgtctagtacagagtgcactccataaatacttgtaaatttgtacatgttatgattttgttctcacatctagctcaccatgtctcctctttcttcttcctctgtgtattccttacctcttctctctctgtgtgtctgtctctcatttctttctcttttgcccctcctggcatgctttcccctgactttgcgcttctctgcactcctggcttgctcctctgtttcacccgctggcttgctccttctctgcatctccctcccctcttattctcctaccccacagctcactgtctgcaggctgccgaggaggctgcttcacctacaccatgtctcgaatcaacttgcggatccgggagcagcttttctcctccctgctgcgccaggacctcggtttcttccaggagactaagacaggtggggcctggagtccaggtctgagattcccatggacatcccttgcccctcagtgaccttccacccacagcctctcctcctgccttcacccgtatgccaggacctggggatgcttttctcttgtttgggacagggtggagaagcagcctccactgtccctctgcaagtgaaggaggatgttcagaggagggggctgtgtcagagggaacggtcaggagggagtttctgggggccctgcagtacacatggtttcctttttcctcacctgctctgtccttcttaggggagctgaactcacggctgagctcggataccaccctgatgagtaactggcttcctttaaatgccaatgtgctcttgcgaagcctggtgaaagtggtggggctgtatggcttcatgctcagcatatcgcctcgactcaccctcctttctctgctgcacatgcccttcacaatagcagcggagaaggtgtacaacacccgccatcaggtgagcgtgcatgtaagggaaccccaaagggagaataaaactgacaggtgaggaggcttccacatttgtggctagaggatcccctagagagagatgttctcttctcagccattaggggagaaggtatattgtagtatatactacattttgtttgtccagccatccaacaatggatatttgacttcagaagattcatgattctccagaactgtaaacaaaaatgtaaagtgtatgtgaaggtatgggggagggaataggaaggggagatgataggcgatgataacttttcattagcttctcaaaggagtctgtacatcccccgcccccactgcgaagattaaaaatggtttcttagaggcttttaggcagggagattttccctttaaaatcagcagaagaagtctggatgcagcatagggaaaggaggcgtcatcaggaagtcctaagtctgaatgtcagctccaccttctctttttctcttatattgtggtaaaacatacataacataaaatttaccatttcaaccatttgaagtgtacagttcagtgacatttaggaaacccacattgttattgggtagccatcatcaccatccatctccagaacttttttcatcttcctaaaatgaaactctgtacccactaaatagtaactgcctactacccccaacccctggccgctggcaacctccattgtaccttctgtctccatgaattgtgatgactcccggtgcggtacgtaagtggaaccatacagtatttgtctttttgtgactggcatattttacttagcgtaatgtcttcaggcctcatccatattgtagcatgtgttagaatttcctcccttttaaggctgaataatattctgttgtgtgcatatatcacattttgattatccattcatctgtcaatggacatttgcgttgtttccaccttttggctgttgtgaattatgctgctgtggacatgagtgtacacctgtttgaaaccctgcttttggttcttttgggtatatacttagaagtggagctgctggatcatatggcaattctatttaacaatttttgaggaaccatgtattagtccatttttacgctgctgataaagacatacccaagattgggcaatttacaaaagaaagaggtttattggacttacagttccatgtggctgggaagacctcaaatcatggcggaaggtgaaagacacatttcacatggcagcagacaagagaaaagacagcttgtgcaggggaattcccctttttaaaaccattatatctcgtgagacttattcaatatcacaagaacagcatgggaaagacttgccctcatgattcaattacctcctacccagtccctcccacaacacatgggaattcaagatcagatatgggtagggacacagccagatcgtatcaaaccaccatacagttttccatagcggcagcaccattttaaattcccaccagcagtgcataaggtttccaatttctccacatcctcatcaacaccactttctgttgtctttttttttaatagccattctaatggtgattaggtgattaggattatctcattgtggttttgatttgcatttccctaatgattagtaaatattgagcatcttttcgtgtgattttggccacttatgtttctttcttgaaagaatgtctgcaagttctttgcccattttctgatttttttttaagttgtgggagttcactatatgttttgcctattaatttcctatcagatatatgattcacaaatattttcttgtatttcatggttgctttttcactctgttgctagagttctttgatgcacaaacgttttaaattctgatgaagtctgatttatctattttttgttgcctgtgcgtttggtgttatatccaagaaatcactgccaaatctagtggcatgaggcttttcttctacattttcctaggagttttatagtgttagctcttatgtttaggcctctgatccatttggaattacatctccacctttcttaactatctgtggctccttgggaaaactacccttctttcctgattcagacactggggatgggaaaattacctcaaatgaaggttaaaaaaattgcatgtatctcctatactacctaacactgagagctcaataatattttgttcccttgctccttcactcttattccttctggaaagaagagtaaggaagagggagagaaacagtttggtatttttaggtagactagggagcatctcactggctggagtaagatgtgggggcctgctgtctttgcacatcagccctggtgtttgctggccctcttttccaggaagtgcttcgggagatccaggatgcagtggccagggcggggcaggtggtgcgggaagccgttggagggctgcagaccgttcgcagttttggggccgaggagcatgaagtctgtcgctataaagaggcccttgaacaatgtcggcagctgtattggcggagagacctggaacgcgccttgtacctgctcgtaaggagggtaagataccagagtggttgtgaaaggagcccaggaaagggggagggcaagggaagaggaaactacagctggttctagaggcctttgcagctcagtctcatagaggcagagagggggaaagaatgggaagattcccagcctcatctctttcttctcctcttccaggtgctgcacttgggggtgcagatgctgatgctgagctgtgggctgcagcagatgcaggatggggagctcacccagggcagcctgctttcctttatgatctaccaggagagcgtggggagctatgtgcaggtgagcgagaagccaagcctgctctccttttttccctctctttttctttgtggactcctgggccttgggctttatttgttctttttaacaatacaatacaaaaccaaaacccgcaagtaattttgctatggagaattttaaacatatgccaaaaatgagacaaaataatattacaaactcacatgtatacatcctgtgctttaacaatgatcaactcatgcccaatcttgttggatctgtatccccagccacttccccccacccatattattctgaagcaaatccaagatattgtatactttcatctgtaaatatttcagtatgtttcttaaaaatacaaacatctttaaaagtgtataacaacaaagccattatcacaccaaaaaattaacagtagttcttaaaatttatcaaatagtcaattgtcaaatttccacttgtggtatccatgtagtatatgtgtatgagtgtgtttattatactttgcttaaatcaggatccagaaatggtccacatattgtgactggttgatacatcttttaagtctgtctgtctatctatctatccatccatctatccatccatccacccatcaatccatgtatctgtctaaaagtttcccttgcacagtttatttgttgaagaaataggttgtttgtcctgtggagtttcttagggtctggattttgttgactgaatccctgtggtattatatgctcttctgcctctgtacttcctgtctattgatagataaacctagaagcttgtgagattgaggggttttttttggtctttttccagcaacagtactttttaggtggtgatgcattcttcctccaagaggcacacaatgtctggttctctatttgtggcaacatcagccactgatgagcagtacctacatccatgacagaattagggctgcaaaagggagatactctatcattcttcatgtattagctgaagtagtctatgaagggagacttcccctcatctaccatttcattacccggtggtacagtttgatgaggaaaggcagagtgagcatttagatctcttcctacatttaccagttctcaaaaacagctacttcatccagggctttatttaaacattttcctagacacttgataaacatcttttttgtgtagagaactgcgctgggcactctgacggctacaaaggtgagttgggcacagtgcctgcatttaaggagctccccgtctaatcaagcaagacagaactgggcacaagtaataggaagcagtaactgaaaagatctggggctagaggcaatgctgtatggtaggagaagggactgtatatcctttatattgcaaattggaacactggggtattggtgccacttttaaattccgtccaaattgtacatttaaaagtggagaatctcttttgagtatggaggaggagcagtgcagttgtgagtggagtgtgtgaggagttgggagggtggtttctggtagaagtgtgtttaattagccggctctcccattcctgttttccagaccctggtatacatatatggggatatgctcagcaacgtgggagctgcagagaaggttttctcctacatggaccgacagccaaatctgccttcacctggcacgcttgcccccaccactctgcagggggttgtgaaattccaagacgtctcctttgcatatcccaatcgccctgacaggcctgtgctcaaggtgcctgaaagagggaggaaacctggacccttgctctctgctgctaatgcataattggacatcacagcctatagttcatttgcctctgagaacctggtcttgcctctgctaagaagagaaatggagggattttgagggagaaggggcaggcccttaactctttttctggttttctaggggctgacgtttaccctacgtcctggtgaggtgacggcgctggtgggacccaatgggtctgggaagagcacagtggctgccctgctgcagaatctgtaccagcccacagggggacaggtgctgctggatgaaaagcccatctcacagtatgaacactgctacctgcacagccaggtgggtgaggagggagaagacaggggacaggagaggggagcatgtacagagagaggatgggagatccacgggaaggcgcaccaggtgttcattctgagggaggtaggtggggaggacaaaagggcccctgccttgggggtttacacatagtcctctgcccctgtccctgctgcacaggtggtttcagttgggcaggagcctgtgctgttctccggttctgtgaggaacaacattgcttatgggctgcagagctgcgaagatgataaggtgatggcggctgcccaggctgcccacgcagatgacttcatccaggaaatggagcatggaatatacacaggtatcttctacaaattgtaagcttgctccttcagtaaaaaagagaaaatcagacttactcttagtggtgaaggtcgtgtccctgtagcttgatgtttgctgttcctctgccctttcctccattcctacgtctccttccccacacactgaattcttcagcctccctcttgatcaagagtctttgtttgcagagagcaatgcagcagtggtgctccctccatgggcagccccgtcaggtccccaccccatggccctcctcccactgggccctccccgcactgggccctcccacctcccgaggtcctactggaagtacctgctgtgcacttgtccctccttgtgtgttgtctgtgtcacttgtatctgaggaagggaatttctctgatttcctcagatgtaggggagaagggaagccagctggctgcgggacagaaacaacgtctggccattgcccgggcccttgtacgagacccgcgggtcctcatcctggatgaggctactagtgccctagatgtgcagtgcgagcaggccgtgagtaccgtgagagggcaggggacagtggggcctgggaggggcatgctgggaggatcagactgtgcagaattgggcagagggaggacgaaggacctactagtggaaacagtctgtgccttcttggggttggggaatggaatccggtggtgtgagggcagccccagttccctcctgggcttccattcctccagctgtggcagtacagccgggagagaagggcagtccaggcctttatctactgccctttcctaccttcttttatttcacaccttctttaccctaaatcataagagatggtgcccaggtggatgtggtgtccatctcattcctgtctttctgaggcactgtgatcaccccttcagctgcaggactggaattcccgtggggatcgcacagtgctggtgattgctcacaggctgcagacagttcagcgcgcccaccagatcctggtgctccaggagggcaagctgcagaagcttgcccagctctaggagggacaggacctctattcccgcctggtgcagcagcggctgatggactgaggccccagggatactgggccctcttctcaggggcgtctccaggacccagagctgttcctgctttgagtttccctagagctgtgcggccagatagctgttcctgagttgcaggcacgatggagatttggacactgtgtgcttttggtggggtagagaggtggggtggggtggggtgggggctgtctgtgtccaggaaacttaattccctggtgactagagctttgcctggtgatgaggagtattttgtggcataatacatatattttaaaatattttccttcttacatgaactgtatacattcatatagaaaatttagacaatataaaaaagtacaaagaagaaaagtaaaagtacccattgtttcacttcctggagataaccatagttgctattttgctgcctgtcccatcagtcgtttatctgttgtttgagatagaaattaaccaaaaatgacataaatattcatgagattgccttcctatatccttccttgttcctaccagtgtctgctattttgaagaagctagggtctggagggacagagaacagttccctgattaacagtattaatagcgacattggtaacagctaccatttatagagttttaatgggagtaggagctatgctaagtgtttttcatgtattatcgtttttaatcattatccccaaccctatgaggttggttattatccccattttacagatgaggaaactgaagctcaaagaggctcaatgactttcccaaggtggtcgtagtggtggagttggagtttgaacacaggcctgaccctagagtccacaccctgacccaatcaattatattgcatcttgggtccataaaccctaatccataatcccatcaagaaaagctctgctgctcttagctctaaataattcagaatctattctcttctctccagtcccgttgttatagtcttcactcatagacttaagatgatcccatcaccagagaggtttctctaccattagcttccctcttccggccattcttcacaaagtcatttttctaaattctgtgtcacatacgatgatggcatttctggaaattccttcaggtgctctcaagccctgctgcagagatccttttcagagcacacactgttccagcccatctgtctcaccctctcctgttgtatccagctccacgacaaactttctgccttccccaacacctttgtgcctttgcatatggtgttttcttgcccattttctgctcgactcgcccctgattttcaagttcaagacttaactcagggttcaggtcttccaggaggccttacttatgtcgtcagtctggggaactctccatgtgcttctatcactgtgcggttacctctttcacagcccttttaaagttctatcttccctttcccaccttttttgaccttccactagaccatgagcacctgggcggaaagccatatatcttattaagctttatatctgctacctggccgagggctaattcatagtggagaataaatagtcaattgaataaatgaataaatatctccaccatcgtactaatcttaatcctccctgcccactcccaccactgaaaatgcaacattgtacacatcactggttgttgggagggacttaccttggaaagttgctattctaggaaagagaaaccttcatattcctggaaacagcaggtagtttccagtgctggcaatgaattccccagaactgctgttttggattttttcttgcctggcagctgttgggagcagggtgcagtgaggatggagtgagagtgggcagtttcttgtgcagatttgcctttctttcatcctggggctgacttgcagctccacacccatccatctctcaaatttcacagagggtaaaataggcatttggagagaaagaactctggcctgattcctttctctcccacaaatgtcctttattcataaaacaggaataataattcctgtatctcccaactacatggaagctgcagccctcacagaagaagatgatctgagaaattctttgatttcctcagtacagttatacccatgcatcataatactttaagcctggaaggcatcttaaaaataatgcaacagtcaaacctaattttacagagaaactgacatgaaatcacgcagctaatcatgataaagctgggtggaaaacttatcttgatgggcagtacaggaagatgcagtagaccttaagatgtcctgaaagtttcttatctcaggggaaactcccaggtaggctttatgtcagggacacagaaaaatgctccctgaaagtcaaaatattcgggctagacagacaaattcctgtaagtgtggtttgtctgggaaccacagatgtcactaatcctggtttgctccagagttctttttgttcactcctaccccccatcaccatttgattgatctccttaccctgtaatttccccttcttgtcgcttacctgcagtatctttcccacccaggcatgccttattctttctaaaggaaagtatgaatggagaggggaaagcttgggaaactgatagatttccttggatgccaaaacacctccatagcctgtctgcccggccctatgtggaaacagcattgagtttcaagtcctttatgcctccacccagggatagccacttggaatccacatggcaattgtgaaacaagcaggaaatgcgtaattgtcagaattttgtggggaaaggactagggaataaggaaaacaaagatcttccttgtgttttagagctgtcagctagaggagcacctgcttgagtctgatgccatctaatggtcccagaagaaactgggttttgaacctagagttccatggactcttaggaattagactcctactactactaagcattcactggtgcttactatgtgctattgctgtgccaagtatctgaaacctgtcttcttaccttatttttcaagataattctatgtggcaggtattactatctcaattctaagagtgagaaaatggagttttagaaacatttactaacttgcctgggtcacatagctaaggaagaggtggacttgcccagctttgcataaaactcctcaaaagagttgcctatactccctgactccacttatcttcctactatcctctttttaaaatatattatttatttatttaaataagcaatatatgaatgtggtttgaaattcaaaagacacaaagaagtatacagaggaaagcctcactctcaatccttctcaaggtttgctaattcctcttgcataggcaatccgttcttccagctttgtgtttatctttccagagaagtttactgtgtattaagcaaatatgtatatctttattcttgctcagtattttcgcaaacagcagctgtctaagttcactgttctgaactttattttttaaattaaaaatatatggctatgtagtattctattttatggaagttccatatttcatttatcctgtttccttctactgatggctagttaggttattggaagtcttttgctgttgctagttagtcttgtatagacattgtaatgcacatgtgcaaaaatacaagtatgatacaatcttaaaggggagttgctgagtccaatatatacattacaaatattgatagatattgcaaaattgccttcatagaggctgtattaatttatagttccagcagcaacatatgagtttatctgtttctccatatatatatatatgtatataaccaacagacagtgttaatttttaaaattttgacaatcttctgggtgaaagtagcattgtattgtagttatcatttgctttttaatattatcatgtaagtaacagagatactaaacccagaaggataagggagcaaagatgagaaaaataaacacacacacaaacaacaataacaaatctgtctaaaatattggaaaatcagaatgagaaatgaaatatgactgtaacgataaaaatcagtaataaaaatgactattaaatttaaaaataaggcagagcaaccacaagtgacatgagaatgaggcagacaaagttaaagcacctaaagtctttgtcttgtttgaaaggagggtagagatattgattaccttcagatgctgccacatttggtaaacatgttaaaaatataagactgacttttaactaatataattagaatttaaaattcctaaatcagtaaggggaaattaaataatactttaaataaaaatgtaattgatttaatataagtgatgcaaggaaaacaaaagaagcaaagtaagacatagcaaatacagagcaccatatattgtaacagaaacgaatgtaaatagcacagtgatcacaagtataaatagcttaaatatgggagttaaaggaaagttctcagattagattaacaatatcgcaaaatccagttatatgcccttcataagatcacaagaaacctaaaaacatgaaaatgttaaatcaaaaccagatataagatacacaaagcaaacactaacagaagacagaaagacagcttatgtaattacagaaatatctaaacatatagtctaaaaccaaaggcattagtaaaaacaaagacagccattacatagtgataatgaagtcaccagaacattatactaaaactgaatcagtttgcacctagcaataaaactacaaaatatgtaagaaatataggagaattataggaagaaattaattgagaaattgaaacacatttctcaatgattatagaataagtggaaaaatgaataaggatatcaaataagcctgttgatgttcttgtctgtaacatctaggaatcaaaatatattctttaaaactaataaatcaagtgctcgtatttacacatttaagactacaaaggtagacacacacacagaaagaggaagggagaggatatgagctagttttgtgattgttcattatttaaaactaataggaattatctaaaggaagagggaactaagtgtattatatacaaataaacttatcaaagcaaccttgaaatatacaccttccttaatatctgaaaaggtaaaatttttaaaatgcacaataaagacatagtgaaagatttttaaaaatactcatgtaaacattatacttaacagaagttaatatctctgaattagactgaatctatttgctgtatgaataattataaatgggcttcttaactgaactaaataaatgaaaatatttttaaattagattaagataaaaactctattatttgcaatatgcaaaagacacctaacataaagccactcagaaagatgtattcattattttcaacaaataagatgatgggcaaagacataacaagagaaggcaaacaaaagggaagcagaggtcacattcgtcttaccaaacaagatgaaattcagacactcctcaccaaaaaaaaaaaaaaaaaaaaaaaattgagtgtgacagaggcacttataatgtaaagtataaaattcatatgaatatatgagacatgtgtttaagttctaaataccaaataggtagctcttataaagcagaaattaaggtagatacaaggaaaatattcagaaatgtactaccaatagaacactttaattccctttccctggactagaccagttaagtggacaaaaaaataggctgggcctggtgattcatgcctgtaatctcagcactttggtaggccaaggcgggtggatcacctgaggtcaggatttcgagggcagcctggccaacatggtgaaaccctgtctctaccaaaaatacaaaaattagctgggtgtggtggtgggcgcctgtaatcccagctacttgggaggccgaggcaggagaattgcttgaatctgggaggcaaaggttgtagcgagccaagatcgcaccactgcactccagcctgggcggcacagtgagactctgcctcaaaaaaaaaaaaaaaaaaaagtatgaacacagaagatagaagatattactatcaataaaaaaatagatatgctacatctatatcaaacttttaaaattgaaaatagaggccgggtgcagtggctcacacctataatcccagcactttgggaggcctaagcagtcggattgcttgaactcaggagctcaagaccagtgtgggcaacagcgaaaacccgtctctacaaaaaatacaaaaattagccagatgtggtggctcgtgcctgtggtttcaactacttggctgaggtgggaggatcgcttgggcccagttcaaggctgcagtgagctatgattgtgccactgcactccagcctgggcaacagagtgaggccttgtctctaaaacaaacaaacaaacaaacaaaaattaaatggctcaatggcatagaagaaaatttttttatgaagcaagtataatattgatgttaaactatgacaatgcacaaatataaaaattgtagatgaatttacttattatactgacacaaaaatcctaaataaaacattgcaaacagattctagcacagattaaaaaacacccattaagatcaaggggttttttttgttttttttttctagaaaaccctttggaagttcatgatattttgaatttcagtggatatttcctgggaataatgagttcaaatgaacgaatatgtggaacaaagcatcaccaacatttattttttcaggatgaggtgatggacaaaaccatcacagggaaattgaggcaaatagtacatgtaaaacaatacttcgggtgagtccacctatcccaaagtcgtatcaaagaagtggctgcagattggagcccaaagcctttggttcctcagtttccaaatggattctcactaggtgggatcatgagtttgctttggacaccccaaattctaactatttcttttgtttcttacatcctttccctcttccccagccccttcccctcatgttacacctcttgctggtttgagacgtcaatcaccactgagaaagaattaaaccagtattttgagctggcaaaattcttagcctagtacaattccttcaattaaactgtagctcaacaatgtgttctctaaaagtatgatttaatattctacctagaaactcagaatatttttcataactcctccagggcagtgtggattatgttgatgtgttaggaggaagtagaaggaagaaaatgaattgagatgtacgttttacttccatgtcaaagtcaccaaaatagcagttgaagggatatttgtgtcaggcaatagggagaataataattttatgccaccctcaaaaaacaaccacacatacacccaaattctctcactcctcagagaaaggggaaggaaagaaaagagagaagcaaaatatgagcttgagtgaaaaatcacagaggagcctgtagctatttagggagggctgctggctgaagtcaggcaggaaaaaaagatcaaaacaccctgccctatttttcaggctcgttcaagtagaagacaaaaacataaatacaggagaaaggaagaaaaccacatctttttcctcttgtctccccagaactgaacagtgtctctgataagcccaggcccttctatcgtagacactgacactatgcacagaaaatgactcaaaaacgcttctaatgggggtgaatctgatgcttcagtttatttaagatgtaccagaggccatctaaggagatccatagcttgctaactgaagcttattgctttctcttcttagttcccatgccaggctctatgccattccttgcttgtcatgtgagatcactgatttcctttggttaggtaggatatgatttccttacagagatctgtcctgacaccaaacagctatgatgaaattccttggttattttccctttttgtgtaccttatcattaccggaatgctaaagctgtaggaataaagtttccctggcttcccaagaaatacagtgtgacagaaaaagtatagcctagggacttactagttatgtgaactttggttcattccatccttacctcatctgtaaaagggagatcatgatagtatctactgcaaagggttttgtgtgatgattctctctctttctctctctctcatacacacacacgcacacatttatataatgcttagaaaatgaactcataataagcaattgacaaacattagctattattatgtaggcaagtcagattttagagtttgtgagccttagacacatttacagagaagaaagagcagccctcctaactttctggtccagcgccatatcctccacttcctccccatccccacatcccttgccatttatcaaccccctctctcctctaaatctaaatacaggcccccgtttgatccatattgtctaggcccttcctctcctctccacatggcccttccttcagctctgagggaagctgcagaagccagccatggtgctgtctacaaagaaggggacacacgcctcttccacccgctcatgctgttactgcatctgatcatctccgtgccgtgtccttgttcacttagcctgtgttgagtgtttgtctccatttccaaatgcaataaaacatctgggaaagactaaggtaggtgtgggcaggaagaagggaggaagttagacccagtggcttgagtgccctctgatgcctccttatcctcggctccacacaagccctcgccagtgtgagctccacagccatccacctggaggaggagtactcaaaaccagggtcaaatgccttgtactcgggggtctaccagtaagcctgtggccagccttccacttcatgaatcgtcacatttacatgagagatgtggagggagaggggtcagcctcctagctcctgtcctgtagcagttaagtcaagtcaggccaggctgtggtaaccaagccagtaccttctttaaagaacagttgtttctcattcatacagagtgtgttgtaggtgtgagtgattccctggggcagctgctcttcatggtgactcagctaattagactgcttttctactgggattgtgccatctcaacacaaggctgtcttggttgacttggtaggggaggaggagaagagtcatgcacgaggagttaaattctttgaccaggaaccttttgttcactttccattggtgagaacgagtcacacagctccaggagagtaggaagtctagtttctcgttttccatgggcctaggaattagaggatgaacactagcgatgtcttccacgtcttgctctctttttctttacctgttataatctcccatggagaagaaattatttttctgattggtctgatccaggcctctaaccaagggcatttactaagggtcatagaacagtaaaaggttgcacaattgcatctcacctctcttttctgaatcctgcttaattaaaactttaaaaactcacttacagaccacttcttgctcttcttagttatcaaatatattttcttccaactcctttttgacagatcttgccttgttctcagctgactcccttgcaaccatctaaatggaacttcctcattcccctttatcccctgctaatcgtcctgtctttattcttttatctgaagaagtgtacccttcttcccccaagccttatgctctctgtcttagtccatttgtgttagtgtaacaagatacacgagatagggtaatttatgaagaacagaaatttatttctcacagttctggaagctagaagttcaaggtcatggccctggaagatttgatgccttggccatcgacttgaaaaaagtcactgaagtgaacttgtggttaccatgataccctgggttcattcttaacatgcacagtataggcaaatcaggggcacatttcatgctgaaagatgatgtgaaatgatgagtaaacattgccctttaaataataataacatagatggtgaattacaatttgcacttttggttttatttgcttaaagatagtgttttactgtctaggttttactgaaagaatacttaactaaacacttgagtcaaatcattccagtgtaacagtcctcacaaggaggaaggcagaagggcaaaagtgccaagctattgcctccagcccttctatttttattgattgactgattgattgattgagacagggcctcgttctgttacccatgctggagtacagtggtgcattcatggttcactgcaactttgaacttctgggctcaagtagtcttcccacctcagcctccaaagtaactaagaccacaggtgcatgccaccatgtttatttctttaattttttaaattttatttggacatgggggtctcactatgttttccaggcaggtctctaactcctagcctcaagcaatcttcctcctcagcctcccaaagtgctgggattacaggcatgagccatcatccctgctctctctagccctttttaaagtctctaatcccattcaggaggcctctgcattcatgacttaatcacctcctaaagggcccaccttttgatactatcacattggtgattaaattgcaacacttgaattttgagtgacattcagaccacagcattttggagaaaatgtcccctttcttctcttttttctcttcagtttctcctttctacagataccttgcacttcacttgcaaccttgttgaagtctctcctgtcttaaaagtttcttttcccaaaacaccagaactcattccttctgtctaactgtaactttgtacttgttaccaacctctacccatttctacccctgactccccagcctctggtaactcctaacgtactctttacttcgatgaggtcaacttttttagattccacatatgagtgaaatcacgtaatatagtccttctgttcttggcttatttcacttaacatagagccctccaggttcacccatgttgttgaaaatgacaggatttcatgcttttttatggcggaatagtattccatcatgtatatatatcacatactaattaccctgatttgatcaatacacaatgtataggtgtgttggaacatcatgctgtaccccataaatatgtacaattattacgtgtcaatttaaaaaacccaagaaaagtattttttcttagtgttgtttttttctaaagtgtatcccattttttcctttgttttcactttcaaaattcttgaaagactattttaatctgcggcctttgttttcttgtttccaattcattcttttgaaatatggcttctacctttaacactctgctgtcctcttgaaggttattggtgccctactaaccataaaacacaataatgctctcttagattgtatcctggtgagcctttttgcaaaattttattctttgagaattctctttccatgttttcttttcttttctttttttgtggtcattttggcttataggaaatcgtactctccaaatgttctctatgtcttctatttcttctctgataatccctttactaaatcttcttgaggcatatgcttcagaatgcttaatttacatactcttaattccttcttaatttacacactgcctgtcggcaatgtcaacacccaataagaagggagacctattggtcagaacaggccagggaatagaagaatacataataaacagtctgcctagttcttctagggccccataatatgtcaaacatatatttttacttcttctcccagcccatttttagtatacctaaattactgtcagtgattctgcaggcaaacaatggttgagttgtatgacacaactttgtgaaagtatcctacccagtacctgatgatgcaaaactcttctatcttgattggttgtcaatctgaggagtttccaatcctggggaagccagaaaaacagcgatttatactcttaatgggtactttctgactgaattttatgagctcattctgaagaggctgacgattttactatctcatttttttcctttctccagaatgggttctgggtgggtcccctgggtggtggctctgctagtgaatctgacccgactggattcctccatgactcaaggcacagactctccaggtaagaacagagcaattgtttttttccagtgtgtatgcaagaattggcatgggggagtgatgcctttctttgtaagtccaggccacagaccagactggaagtggcttttggtttcaaagaacagtgttcttccctttggcagaaaggtacgccttgcctctttacatgggatggacttcatataccagagccacctattcaaggggtagggaggcaggaagagggaaacattgtgtcttgtttaggatccttattgtgtgtatcaacctcagtcagtgcctgggcgtgttgaaggccttggcttgggttcgagcctgctgggagaaacaacctgcagtaggctgggtcacagaggcaatctgtgattttttggtcaggacacggaaacaaatctcagttggggtatatgtggacaaatgaaactggaaacaaaggttgctccttctgtcatttattaagccactattatattgtcagaattgtactaaacagttttgagaagtaagagaagttgaatagaatacattgtccttgtcctccgcccaccaggtacaagttacttgtcactgttatttttctagcacaggtgacagaatatgcagccatgaagcaatgtgagatgaaagcacatattaatgagcagaaacaggatgtaatgtgctaagaacagaatcccctttgcatgttagtttcattaaatacaaaagaggaacaaacctggccaggagagatcattattctcagagaatagaaaccgccctgagtttataatgtccattaaacaatacaactgaaaaaaaaatcagcacagatgttaaatgatgatgaaaaattcagatttcccccctagtttagactactagaggaaatagagaagagtatacatgctgagaaattacaggctggaacttcatctgaaattagctactgagtgagggataagtggggttcacctaggaaggtcattcttatggctcagttcagagttggaggaggctaaaggaaaggtaaattacaacccaacattaatagcaattatctttcaagtcttgacttagatgcaatgtcttcaggacgtccttcctgacttacctacattattaactccatttgaatttcctttttattgtagttgttgttcttaagtgcataggattggtttaattttacccaatgagttcacagcacattgtaattattggcagtagtgcaagactctctcgtctcttctcttgcctccgttctcattctctcccctccctagagaatccattctaaacgtgtctggtaagtctctaagtatgagagtggcttttagaaatatgtagcattattgctctttatgtgtttttaaaatttaataaatgtcattctctgttgaatcccattctgtttcttttctcacttgacactgtgctttttgagcatactgaggtcaaaggcctcctcttagatccatgtggtctgacgtaatttaccaggcatgggttttcccagaggagggggctggttcatggttttggttttggttttccagaagattttgtgattcaggcaaaggctgactgttacttcaccaacgggacagaaaaggtgcagtttgtggtcagattcatctttaacttggaggagtatgtacgtttcgacagtgatgtggggatgtttgtggcattgaccaagctggggcagccagatgctgagcagtggaacagccggctggatctcttggagaggagcagacaggccgtggatggggtctgtagacacaactacaggctgggcgcacccttcactgtggggagaaaaggtgagctggaagctgaggtctggcggggctcaggaatgtcccccatgtgaacctggccatggctcttctttcttacaagcaattttctgctttaggataaatggttgtctgtgtagatgttctggccccagctgtgatatattatcctcacaagtcagccactgtgatcttggtctcagacccccaaggttctcagggacttcgagggctattgtgccctcaaagagaagcagtaattgtgggagtacctcagaaagtctaaatcctcctgacaggcattgacataccctgttactgatcttgggggctgagacttgcctatactttgtgttcacttgggtgatctgggaaagagattagacatagtgatagtccctaaagaatctcctgtcccagcttggtggttttctttcacggtgtctcatttttcctcccttcctagtgcaaccagaggtgacagtgtacccagagaggaccccactcctgcaccagcataatctgctgcactgctctgtgacaggcttctatccaggggatatcaagatcaagtggttcctgaatgggcaggaggagagagctggggtcatgtccactggccctatcaggaatggagactggacctttcagactgtggtgatgctagaaatgactcctgaacttggacatgtctacacctgccttgtcgatcactccagcctgctgagccctgtttctgtggagtggagtgagaattagtttctagtactctctgggcctgactcaggactatactgactcaatacagagcctgtgtcacttctgcgtttatcttggtcacaacatgaattattctttcccttgatctgggacagtcacagaaaccagagtccttgggttagggtgggagaaaacatggcagatatctatcctcatatcttccaagaaatgaggagatctaatcacctcattatgtgcttccaaccctatgaactggtgtcctctaattctttggtcttagtatttaggaggcattcttatgggctgtgagaatctgtaaccgatggggggtaactccatgggtgccaactttggtttcgaagaaccttttctaaatttatttatttttctctagctagcattggatttggtgtctagtacagattctgggattccaagaaagtgctttaaatattgggatatttttactaatttaaagacctgtttcccataggagctcagtctgaatattcttggagaaagatgctgagtggcattgcagccttcctacttgggctaatcttccttctggtgggaatcatcatccagctaagggctcagaaaggtaatgagcctgtgaggagtgccctgccacctgtcccagaccttccccactcccaccttccctaacgtcaatgatctgaggcaaggaaagctgattgtgcctctcagggatcaccgggataatttttttctgaagctagaaatgggataagcagagagagtgctgaccttgccagccatttgttcttccctcgggataatcatattgggtcctaattggggcaatccattcttttctcgatttctttccaggatatgtgaggacgcagatgtctggtaatgaggtaatgtctctttttccttgtctttgagtggcagatcattctcccggttctttggccagagggagatgacatgggggtagggaggagtaaggttgctgctgtctggatgggactgtcccctgagtctctggaacggctgtggggggtggtgaggctgcctcctgagaccttcatcactgtgcctccaggtctcaagagctgttctgctccctcagtcatgctaaggtcctcactgaagcttctctctctggagcctgaagtagtgatgagtagtctgggccctgggtgaggtaaaggacattcatgaggtcaatgttctgggaataactctcttccctgatccttggaggagcccgaactgattctggagctctgtgttctgagatcatgcatctcccacccatctgcccttctcccttctacgtgtacatcattaatccccattgccaagggcattgtccagaaactcccctgagaccttactccttccagccccaaatcatttacttttctgtggtccagccctactcctataagtcatgatctccaaagctttctgtcttccaactgcagtctccacagtcttcagaagacaaatgctcaggtagtcactgtttccttttcactgtttttaaaaaccttttattgtcaaataaaatggagatacaaaaaatgtacattttagtgaattatttaagaaaaacccctgtaatcaagtcaaggaacaggactttgccagctccagcggaagtctctgtacgtcaggccaatcaaagcctctccttcccctcgaaagtgaccatatcctgattttattgtaacctctttcatgtctttgtagtctagtcccccaggtatgtgttcctggacgccacagcttagttgtcttttacgtctctcatacttcactggtttctcccccttcagcctttttttcccccttatgattaatctgttgaaaagctcaatccatttgacctgtagagtttcccacactctggattttgctggctgcgtacacatggtgcagtgtaacacatcctctgccttctgtgcctcccgcaaattggcatctggatgcagaggctggatcagactctggttcaatcttttcctttggaaaatctatacgtggtgttgtggcctttcaccatgagagacataatttccagctgtttctttttgtgatgttagcaaccattgatactaattgcttaggtctgttaatttattggggattgctaaatggtggtattctgtcattttttcttcatttatatgctttattaatgctacaaagagacagttcccttcatttactagtgaagagacacttccctccacttactagtgggctacttagtggtacagtggaaaggcaggatcagtgtttgactctccttttatttaccagttttcaagttagcaaattggtttcctactattaataaaacctacagatggccaatcaggttttacttttcattctttaaataattataaacagaaggatttaaatgtttgataggttttactctattgcaatttttatgcttgttaaagcttatatcctacatttttggtgagtgaaaacttcttcaagtggctaaaaatgaaactgagttcttttgacgcaaatttcttttgataatttctttgttatctgggatgacaacatgtttctggttcatcttgttcatttcttggccagacctggaggtagccatttttccagaaatccctggtttagtttagtgggaaatgacatttaagactataatccagcgttagggtgttttgtcccactgaacccgctgctggagtcacctcaaaagtggcgtcaagggagttaccacaaggaagttcctgaaaccattctgagatggtgtgggttaggattcaaagaaagaagcactaaatgccagggtgatcagtccaaaacatttgtttagggaatttacctacagagggcttcaggagtccttgcagacagcaagagaaaagggatgttctgcctaggtatgtctgcagcgagggggtcagggtatggagcttatatgaaggtttaaggaacctggctcagggctgggacaaagtttcagtgtttagagaaacaacctagatacgtttatcagtgcctgggagtgttcaaggccttggcttgggttcgagcctgctgggaaaaacctgcagctggctgggtcacagaggcattctgtgatttttcggtcaggacatggaaagaaagcagggagaggggcagtgggggagcctaaatagataggaatggtcattgtgtccagcctgttcaatggcaataaaacatttatacatgtatacatttaaaaaaatcagtcatccaggcacggtggctcacgcctgtaatcccagcactttgagaggccgaggcgggcgaatcacgaggtcaagagattgagaccatcctgggcaacacggtgaaaccccgtctctactaaaaatacaaaaattagctgggtgtggtggcacgcgcctgtagtcccagctactcgggaggctgaggcaagagaagcgcttgaacctgggaggtggaggttacagtgagccaagattgtaccactgcactgcggcctggtgacagagcaatactccatcttaaaaaaaaatcagtcttctctatattacttctgcatctcctttcttttataccaagaactctggttttcaaggacacagggacagacacaattagaatgtccatacttatttgcttttcctgagttaacatagacagcagtctaaggataataacactcatacacaaccaccaaaatggctactgaaaacggttgaaattctttttacctacattctccctattacctgtgttctccctttttacctatgttctcccccgctttctagttgaactatgtctatattagttgatcctgtaccattgcatagactacttgctcccttgttagtcttagttctgtgagtagagatatgtttaatgctcaccatcattccttatgttgatatccctgtcatgtggtggttttcaaggtgtggtccatggattcctgggggtccctgggacccttcaaggggcctatgaagtcaagctatttttgtactaatactaagatgttatttgcctttttcactgtattatttacatattggtacagaaatctatggtggtcacgtgaaactgttagtgcctgagcacaaatcaaggtggtgacacaagctgtacaggtaggtcatgttcttcactcgccataagcttacagtaaaaaaaaaaaaaaaaaaaagcaaaagccagtgaccttgatgaagcaataaaatcattagtttactaaattttaaacctcaagcacacatctgtttaatagtcagtgtaagaacataggcagcatttctggtgcatactgatggaaaggcagttgtcctgtggaaaagccattatgtaattgcatgagttgtgagtgaagttaaacattttttttttagtgggtcatcattttccttgaaagaatgactgaaaggcacactgtgattattcagacttgggtatttggtagaaattttctcaaaaataaacaaaatgagcctatcccatcaaagaaaataatattgacagtggaaattggaatttcaagagaaaattaaaattttggaaaacttacgtgtgccacagcttctcactacttaaagatgtttctgatgagattggtggtgatattaacaaatatggcttaaaaaatattgtttaataaaatatgtcaacattttaaaaatctgcgtaaacccatgaatcaataatttacaaataatcaatgcatgatattgcaaagtcatgcataaagatccatttaaagatagactagtgaattttaacacaacagaatatgaaaagttaatatataaggtttcagattccacactgcaactaacctttaagaatctgccatttcttgagttttggtgtcttatcaaggaagaacagttacgatagctgaaatggttatggaaactttccttcttttcccaactgtgtataagagtgaggccagattttcctcttgtgctttagccaaaacaacatattgttacagcttgaatgtagaagaatatataaccaagctagctttattaagccagacattaaagagatttttacaaatgtaaaataattccttttttttcactatttttttgtgctggagaagacagctattttccataaaagtgtgttgtttatgttaacatgtaatgggtttgttattgttatttaataacaaataaattaatataaatgtcactttacataacccatgtaaactaaagcttcttggtgttctcaacaattttatgaataaaaagggatcctgatatcaaaagaattataagctactgatgtagtcatcatgattgtttgaaactatttctcctaggtgcctcaggaagacttaggaaagtgtcttagtttgtatgagctgctataaccaactaccagagactggatggcttaaaaacagcagaaatgtatttttcacagttctggaggctggaggtctgagatcagtgtgtcagcctggtagggttctggtgaaggcctgctggcagcatcttctcactaagacctcatgtggcagaaggaaagggagctatctggaatctcccttataagggccctaatgccattcataagggctgcaccctcatgacctaatcaccttccaaaggcgtcacctcctggtactgtcaccttgggcgttacgatttcatcatatgaattttgggacggcatatacagtccacaccaggaagttcttgcacttcatagtcgaaagtcagttttgtggctataaaaatcttggttccattttccgctcttgagtatcttaaaaagttactacattttcacataactgctatcaaaaagtctgatgataatctaattattaataagtcattgctacttttgctgagtatccagatggtattttctttttctttagtatccacaagttttattggaatgtatcttggttggggggagggcaagatcgctgactagatgcagccaggtgaaacagttctcaatgaggaacccagatgactggcgtgctcctaacagatgttcagacagaaggcacctagagtggacagagggaagacacagaagctggactgaagtgggagaaagctgggagccctacatggggctacagcacatccagactcattcctgtcctccaatggctccaggaaaatgggtgagttgaactggcaaggaacaacccactgtcactatgacctctgcaaccatggcaggaggagacccattgaccaccatggacacttgagttggcaggaagagctgcttagagaagccgtaggggtggcaagccagcgggtgtggagcctagaggattcagtgcaggagcatctgcagtggagcatggccagggatggccatttccctaggctcaacttactcccataggagacattagccctagggaaactgttggtcctgaaatctgtagggtggtcttgcccatcagatgagtctggttctacctgagcaaccgttggtcttctggcctctcctggggccctggcctggccacatctgcttgcaaagcagcctcaggtgctctgtgggcctgcaccatagcttctacactggcagaccatgactgaccagtaagtggagagctccaacgaggaggcccctatgaccaggcaccagcctgcatgctccctccccacactgcagcttcctctgggcccacagcaactccccacatcattttgctggtacatgtctgctgggtgggttttgttttccttgcctcaccagcatataggagtgtaattcaccccccaccaattccctcctgacagccattgcagacagagccttggtgggcacagagccagccagccccactccctccatcatcccaccctgtgctaacactgtgcagagaacagctgatcctcccccaccctgagtgaccactcctgcacagaaaaggcacgcagacctgcacctgccaatgccttgcccctaagccaacaccacttcctgtgtgaccacacacacagttgccagcaggggacccccttcctttcctgcagttgcattgcctctgccactgtggtggatgcctgcagggaggtgggcaccccggcacctgctagtactctgctgcagcttcaactaccactgctgctggtacactcaaacaaggacagatcctcctgtcactgtactatgaaacactttggctgacaccactcattggagtgtagtgaccagtggtctgggagcacttcggactgcaccactcctgccacctcccccaccccccgcccatcacagcggattcctaattctgaggaaacagagaacaaagtcagggccccgtacaagtcccaaagaattacagcatgcagtccaggagttgggagtggaatactggccaaataaaattgtccagaaatgaagtcagttggctgaatccaccttataccacaatcaaaccctcaaagtcatcaaataggataaataggataaataaaaaaggttggatgatctttgctgtccaaaggtcagcagtctcaaagattaaaggaaaataagcccacaaagatgagaaagaatcaggcaagaaccttgacaactcaaaaagccagagtgtcttctgttctccaaacgaccacatcacctctcgagcaaggattctgaactgggctgagatggctgaaatgacagatatgtaattcagaataaggatagaaatgaagatcattgagctacagaagtacattgaaacccaatccaaggtagctaaaaattatgataaaacaatgcaggagctgatagataaaatagccagtatagataaggacataaccaatttgatagagctgaaaaacacactataagaatttcataatgcaatcacaactattaatagcagaactgacccagtggaaaaaagaatctccacacttcaagactggctttctgaaataagatagtcagacaagaatagagaaaaaagaatgaaaaggaaggaacaaaacttctgaaaaatatgagattatgtaaacagaccaaatctatgactcattggtgttcctgagagagatggggagaatgaaaccaacttggaaaacatatttcagggtatcatccatgagaatctccccaacctagctggagaggccaacattaaaatacaggaaatgcagagaaccccagtaagatacttcacaagaagatcattccaaaggcacataattatcagattctccaaggttgaaatgaaagaaaaacagttggcagctagagagaaaggccaggtcacctacaatgaaaagtccatcagactaacagtggacctgtcagaagaatctctacaagccagaagagactggggccaacatttattattcttaaagaaaataatttcaacccagaatttcatatctggccaaactaatcttcaaaagtgaaggagaaataagaaccttttcagagaaggaaatgctgagggaatttcattaccactagacttgtcttacaagagctcctgaaggaagcactaaatatggaaaggaaagacttactagccactacaaaaacacactgaagtacacagaccagtgacactataaagcaaccacataaacaagtctgcaaaataaccagataacatcatgatgacaggatgaaatccacacatatcaatactaatcttaaatgtaaatgggctagtgccccaattaaaaggcacagagtggtaatctggataaagaaccaaggcctattagtatgctgtcttcaaaagactcatgtgtgtcatgcagtgacacacataggatcaaaataaacagatggagaaaaatctaccaagcaaatggaaaacagaaaaaagcaggggttgcaatactagtttcagacaaaacagactttaaaccaacaaagatcaaaaaagatgaagaagggcattacataatggtaaatggttcaattcgacaaaagatctaagtattctaaaaatatatacctccaaaagaggagcacccagattcataaagcaagttcttaacgaccttcaaagagacttagactcccacacaatgatagtgggagactttgacaccacattgacaatgttagacagatcatcaagacagaaaattaacaaagatacccaggacctgaactcagctctggatcaaatgaacctgatagacatcttatagaactttccaccccaaaaagacagaatatacatttttctcattgtcacatggcacatactctaaaatcgatcacataattagaagtaaaacactcctcagcaaatgcaaaagaactgatcataagaaaaaatctcttggaccacagcacaatcaaattagaaaccaagacaaaaaagttcactcaaaaccgtacaattacatggaaattaaataacctgctcctgaatgacttttgggaaaataatgaaattcaggcagaaatcaagaaactctttgacatgagtgagaacaaagatacaacacattagaagctctgggacacaactaaagcagtgttaagaaggaaatttatagcactaaatgccaacatcaaaaacttagaaagatctcaatttaacaacctaacataataactaaaagaactagagtatcacagccaaccaatctcaaggctagcagaagacaagaaataaccaaaatccagaactgaatggaaggagattgagacacaaaaatgattcaaaagatcaatgaatccaggagctggttttatgaaataattaataaaatagatggacttctagctagactaataaagaagaaaagagagaaggattcaaataaacacaattaggaatgacaaaggaggtattaccactgaccccacagaaatacagacaaccatcagagaatattatgaatacttctatgacataaagtagaaaatctagaagaaatggataaattcctgggcacatacaccccctaagactgaactaggaagaaattgaatctatgaacagactaataatgagctctgaaattgagtcagtagtaaatagcctaccaaaacaaaacaaaacaaaacaaaacaaaacccaggaccaaatggattcacagctgaattctatcaggtgtacaaagaagaaatggtaccattcctgctgaaactatttcaaaaaattgaggagaagagactcctacctaactcattctatgaagctagcatcatctaaataccaaaacctggcagagacacaacaaaagaagaaagcttcaggccaatatccttgataaacattgatgcaaaaaatcctcaacaaaataccagcaaaccgaatccagcagcacatccaaaagccaatctaccatgatcaagtaggctttatccctgggatatgaggtttgttcaacatataaaaatcagtaaatgtgattcatcacataaacagaactaaagacaaaacccacatgattatctcaatagatgcagaaaagtcttctgataaaattcaacactccttcatgttaaaaactcttgataaactagttattgaaggaacatacgtcaaaatagtaagagccatctatgacaaacccgcagccaacatcatactgaatgggcaaaacctggaagcattccccttgaaaactggcagaagacaagaatgccccctctcattactcctattcaacatagtactggaagtccttgccagggcaatcaggcaagagaaaagaataaagagcagccaaataggaaaagaggaagtcaaagtattcctgtttgcagatgacatgatcatatatctagaaaaccctatcgtctcagcccaaaaacttcttaagttgataaacaacttcagcaaggtctcaggatacaaaatcaatgtgcaaaaattactaatatttctatacaccaacaacagtcaagcctagagcaaaatcaggaatgcagtcctattcacaattgccacaaacagaataaaatacctaggaatacagctaaccagggaggtgaaagatctccacaagaagaactaaaaagcactgctcaatgaaatcagaaatgacacaaacaaatggaaaaacattgcatgctcatggataggaagaaacaatatcatcaaaatggccatactgcccaaagcaatttataattcaatgttattcctattaaactacaattgagatgcttcacagaactagtaaaaactattttaaaatgcatatggaaccaaaaaggatacatagatacaaaataaggacatgaaaacatgtgcaatgtcattagccattagagaattacaaattaaaaccacaataagatattactatatacctatcatgatggctaaaaataaaaagtaggcacaataccaaatcctggtgaggatgcagagaaaatagatcactcacatttggctgctgggaatgtaatatagtacagccacactggaaaatagtttggcattttctttaaaagcaaaacatgcaaccaccatacaacccagcaattgcactcctgagcatttatcccagagaaatgaagacttatgttcagagaaaaatctgcacatgtatgctcatagcagctttattcagacaaaaactggaaacaaactgtggtatatccatactaggaaatactacttagcaataaaaacgaacaaactggatacaggcaccacgacctggatgaatcaccagggaattatgctgagtgaaaaaaaaaattgcaaaatgttgtctactaaatgattccacttacataacactcctggaatgccaaaactatagagatggaaattaataattgctgtgttaatgaagaagtggaaatgggagggaagtggctgtggctacaaaagggcaaaatgagggatattatagtgatgaaagtgttctttattttaattatatcaatgtcaatatccagactgtgataatttactgtagtttacaagatgttatccttgggggaaactgggtaaaatgtacatgagatatctctgtaacatttcttacaagtgtctgtgaatcaacaattatatcaaaataaaaagtataatttaatacagcatcttaacattttcaacaaaactaagtgtcaaagtatccccataaacctcaaatacaaattggtgaggacaaaccactagtagttgcacgttattaatttttcctgttatggattatgcctttggtgtcaagtctaaaagctttttgcttaatcctagatcctgaagattttctcctgagagttttgtgactttatgttttacatattagactttgatccatttttatttcttcctttgaaatctgcacgccttttttttttctcgcccattacattatctagaacttccaacgccatgttgaataagcatggcgagagtggacatcattgctttgttcccgatctttgggggaaaaatttcagtctttcaccgctgtgttagctgtaagattttttgcagatgctctttatcaaattgaggcagttcctctctatttgcattttctgagcattttatcatgaatggccattgaattacgtattctaatacctcatatatgtacatcattaacttggattacacttctttaaatagctgcctgttctactggttgtcaaatgagctgtatcctttctatttaatgcctacatgaagtttttaaatatggactctatgtcatatatttagtccctttcaggtttccaacataaagtgatactatttcagctacttaagcacttatttaggatttatgcctcatgtagtttagatttattatgagtttgcacttacatttgattcctttttatactcctaatgtctttttttcttaaacaagtggcctatatatttggactcacaatatttatacatcctctgtcaccaggggtacatgtccttataccttaaagcacgtgcttctggagtcctgtcgtgttacatgtttcctctaaaacaaaccctccatgttatttgagagccaaccccacttttcaagttatttaggctgctgtaacctccattaataaaggattcaaaagtcataattgtgtgattctttaggaattatccaaaaaggcaatctgatttattttccaaatatcctggatctgaaataatctatcagagtttatttctatgcttggaaagcttccttggatgtcagcatttgcgattttcttacttagcttatgtagctaagtaagaaatgaattgcttttgttggtttcttagtacattctgtccatcaagtacattgagttgtttagaattgttttgagtcaacagtgtaacaagcatccaaaatcttgtatagtcaattttgtttgactattgtgctagaagatcaatttctatttcctctgttgacaatatcctgagcattttgaagttacacaattgcagtggtaatttagcggaagagtgttaacattttaacctaaataattgattttgtattaaacaaattctgatgtaggaatgtatttagtattaactatatggaattctctataaatctcataaacagagtagttgcttttttgaaggggattaaaaattaaatatcaacattttcattttagaaaataaaaaatgtggctcacgcctataatcccagcactttgggaggctgaggtgagcagatcacgaggtcaggagatcgagaccatcctggctaacacagtgaaaccctgtctctactaaaaaatatgaaaaattagctgggcatggtggtaggtgcctgtagtcccagctacacgggaggctgaggcaggagaatggtgtgaacccaggaggtggagcctgcagtgagccaagatcatgtcactgcactccagcctgggtgacagagcaagactctgcctaaaaaaaaaaaaaaagaaaagaaaaagaaaaggaaaaaatgtcttttttctttttaaaattttcctattttaatatttaaaattattttatcttttttttaaaaaagttatacatgacatggtttaaaacatcaaatacagatggttcctgacttatgatggttccacttaagattgttcagctgtgatggcgtgaaagcagtacacattctggaagaaatgtacttcaaatttgaaatgtcagtctttctctgggctagtgatatgtggtataacactctcacctgacgctgagcagcagtagtgagccacagctcccagtcagccacgctaatgtaagtgttctgagcatgttgagggtaggctgggctaaactatgatgtttgataggttaggggtattgaatgcattttcaacttgcagtttatcaggacacaaacccacctgaagtcaaggagcatctgtatttctacagggcttgttatgcaaaacagctgaccacactgcctccccattcctctttccagacagaaattctagtagatagtcccattttacaaatgagaaagtggaggcttagggaggttaattaagacacgcaagttcatatgggtaggaagcgatggagctatgataagaactcaaatccatatggtccccaagcctgaggtttgagctatattgcttcgtgattacaggatatattagtttcctattggtgctgtaacaaattaccacaatttagtgttttaaaacaacaaaaatttattgttggacagttctggaaattataagcctaaaatgggtcctgttaaattaaattaaatttggcttaaagcggcctctgtactttgaattcctacgtagtatactgaaatctaacttaatgtgtaagaaaattgtaccctaacttaagagcatattcttgtaataaatagctgagtctcaggcaaacacagcagccaagcttcaggcaatcacaggttgccaactgatcagaccatgatcaaataaggcaaatactgagctgtaaacaagctgcttctgtataccacttcctttttctctctataaatattgcctgcccctattgctcagtggagctctctgtacctcttctggtcctggatgctgcccaattcatgaattgtgctttgctcaaataaatcaaaataaatttcatttgttcaaagtttttcttttaacacttgtacagggctaatcaaggtgttagcttgtctgtgttccccttctgaaggctttagcggataatctgtttttgcctcttccagcttgcagcgaccagctgcattcctcggctgatgcccccttccagcaatcactttcctctgatttttgcttctaatatcacatctccttcttctattctcttgcctctttctttcacttagaaggacccatgtaattatatcaggaccacttggctaatccagaataatctccccatctcaagatccttaatctaatcactaatgcaaagtcccttttgccatgtaaggtaacagattcacaggtttcatagattcagatctttcaggggtggcagttgggggcattattccatctaccacacagagtaaagtttcatctggatgacccacaggccctacaaatacaaaatgtctaatatggaatgttctcttaaactgtcctttcttgatgactggaattactaaccacttggtctcccaagcatcttctgctctcgccttctcctctctcccatatacaatggatgacgacacatcatgttgcatctgctccctcacatgtctctgaccctctctctagatccctgatcctactttaattcgagccccatcatgtctggtctgtgttactctaacagttacccacgctgctttctctgctttcaattttatgctcctctaacccactcttcccatcagagtagtctttctaaaacgtgaagctgcccatgacccttcccttactatcagtctgcatactggtcctactgactgcagatcaaagacccaagtccttagcctggtgtgtgaggcatccatccctagccctctgcttcatctgtcacccacccattttaccaattccgaaagactttcacttccctcgaagcctgtccaagtgtccaagccgctcatgctttgttagacttggaagccattctccatataccctcgatcagcttgaatgtcatttccactagaaaattttcctaattgtttgtgacttcaatgtcctaattttacacacatttctgctgtgcccctttgtttgctaatatgtctcctgggtggtaagcaggactccgtgtcttattaatattttccgtctccagaattcagccactgtctgccacacaagtgcataatgagttactatactaatattatgcagccatgtcccctgtacagcagttccctggatctcatggcttcttttttgatttgccttgtttgttaccaacttccatcagtaagacaatctatccaatccttgtcccctttgccacatcacatcctcagggcaataacaaagttgttaagtttatgcaccttctccacttggagcaaggcctcaccatgtcaggcctccgcctgattctcctccctgcctgggatggcagattttgctctagtgggtctccaggccgtgaggtctcctgtcttttatgttctgatccgggtggtgagctgcagctcactacaagtccttacttgtctctgctggcctttagagactttgtactcaatttggaggaactactcttgatggattgtaagtgagaggatttcctggtctccctctggagtccgccagaaaaccacattctctgcttttcagcgttgactgctcatgcttacgtaatttctaagagtaagagcctatggactgtcctggcagcaaagaattcgctcaggattttgcctgaagctgcacttccggggtctcgcttcatcagaagacttcttcattttcatcatcggcccagcgatgcatgggtacctcttagggtttagccccagaatgtactgggggaggggagggtaaagtaggtggggaaggagtcagagtcgtaggtcatctgtggctggagttttgcatccctaataaacgggaaatgaactgaaggaagactgggttttcacgtcaacacgaaggacaccattacgatgctagactaatcatcaaataaaattccagatggaaaaaattcagaaacttaatttggaatttgagccccgctctattatgcaacgttcccagccattgctccgcggatgtaatgtggacttccaccgccagatggcgatcgagaccgtaatttaagttggttttctcaacttcctctggactgagtccccgtgaaaatcccaagtttaacgaggggctttcctcgcgtaaccttcgcttctgcttcctctctcacatcacctcaacctgcgagactctgaaagggataatgagggttggggggaatatggaaattcagggaagggagaggggggtggtgtgaagctttccagaccagccacacagaaatagcgtaccaatagtggtttagagcacagacccccagccagaatgagtaatttaaacagccctacgatgtaatcgttgtgtgcatatgcatctctatgcctctctctctctctgtctttctttcatctgagacagggtctcactccctctgtcccacaggctggagtgcagtggtgcaataatggctcgctgcagtcttgacctcctgggctccagtggtcttcccacctcagcctctgaaaccacagggtcttgaacttctgggctcaagtgatcttcctgcctcggcctcctaaagtgctggggttacaggtgtcggccaccatgcctgtctgctatttaagtgcatagaagaatgcctggcactcagttagtgttaaatatttataaaataaattaaaattttataacactacacacatgttgttgagtatgtcataaatagagacatatttaatgagatgtcaacatatatcacgttaatgaattaagtaagtttgagaatattagagaagaatgataatagattaacggaggaggctggcgcagtggcccacacgtgtattccagcactttgggaagccgaggcaggcagatcacatgaggtcaggagttcgagacccagcctggccaacatggtgaaactccttctctactaaaaatacaaaaaaaaaattagccgggtgtggtggtgtgcgactgtaatccctgctaatggggaggcggaggttgcagtgagaggagatcgcaccactgcactgcagcctgggcgacaaagcaagactccatctcaaaacaaacaaacaaacaaacaaacaaacaaaaaacagacgaaatagggtttgagtatgtagtctgctctcaacatgagatagtaaagtctttgcttcccttatattctgttaattaactcatttgatgcacatcgatgtataaagcctttaacttctatttattcttttccttgaaaagcatgcggaatgccttctcaggactctcccattttttatttgtgaacacccactggcattcccggatacgaagcttgcaagaaggtgtgaaccgccctatactcgtgagcccctggggctctgtactctttccagcccacatttgacctcagtcaatttttaaatgattccagctaaattcttcttaccagtgcccagctgtacctgccttaggtaagcaagcactcaggcaacaactttcctagatttcaagctagttggaagctcaatcccagctctgtgatgggttgaaaaaaattgcgaccttgcaatttgtgtgatttctttcatgttgcaaggaagcatcattgtttccagttctctgcatccccaagcagaaaccagaactctatataaacgtttttaaatggagacattgagaaaaagtacccgagaaaccaatgagatacaggaagaatgcttccagcactaacatgaatggggcttggccatacagatagaagggttggaaactcttacgccttgatttaaactctctatgcatattctgagcacgctggggaatgtactactactaggcttgatttggattcatggctactacctcccacaaaatgataggtcttctgttttagtacgtgagataattcctcaatcgatcttattgctgctatttctgttaagcataaacaatgatttgggtcacaaatttcaatggggtttaaattcctttgtgcatcccaacaggtaatcctcttactctgggctatgaacttgctactgccaagatggatgccatgaaaaaaagagatctcatcaaaatggtcacagagagatggagggcctctgtgtagatggcagggtggtggtggccgtgtaactagctgcccggtgaggagcagcccttggggagagcccaggtaggaccaggagaagcagaaatagagaaaagtgaaagatcgaggtggaaagaacatgagggacaagagctctgcatggccacatcaccagcagtcttgttattacaatgaggatgaagggactgaaaagaggggaagagatggaattcatcaaacaacagtgctcattcatacaaggtaagtatacatgtggccttttctctctctatctgaagatgtggcttactgtaacaggaactatcatgggcattggacggctgtctcatggtgatcccatcctcctctacatcctaaacttttttttgaatgcatttctgtattttgacttcctctctccccaaagttcttgttaacttctgagtatgacttagcttccttattctttgaaatatttgaaacccctaacttcctctcctctgtggtgtaactcacatggcttcttgataccaggaggcactgtctgcatacaacctcatattatgaggatgaaatgcccatgaatcctaccaatctgaggaacaacgcatttgtcttctctgacaaaatacgggtgccacatattctgtaggaaaaggtggtgttgaggtcagaacttctctgtttctctgtctctctctctctggttctggaaatgttgagaatatgagtgaagggaaaaagatgggcaccacgtggaggcaatttcatggtggcatgaaacaattttgggggcatgaatgccatgggcagaacatcagggccccaaaagggaaatacacagtactttctttggacttcagtgctctcttttatagtaatggaaaccacaagcgcagaggaaggggagctgattctataaaaagaagtttatttcctactttaaaagatgattttttgactatcttcccacaatagagccagaggatcacaggggaaagctacgatcctcaattatagaaaatgatgttgggtgcatctagcatcacagaagctttagaggacacagtcatctcaggtacctacagataaggaagaagtaccaatgagagtacctactcgtattcttattcatggaagcgaatcccttcaggaaccaaatcatttagctgctggtagatgtttcttttggctcctctctctcctgagctctcaaacacagacttttttttctgtgtgcctctgcttttggcaactctgttccaagaataagaatatttgtttgtagatgagcttgctaggtcggggatctcttgtatagggagatggtgaatcactgagcaggacacagaggcatgagttgaaacagtgagatgtaccttagtttaaagagaggtcacaagagctcatggaccattattagataaactctaaattagaaaaaagaaccatatttctcttttgatagtcacataaaaattgaagccatactcattctaataaaaagtaacatgcatagctcttcattgcaaagctcatctattattcataacaggcatatagggtctatatcatttttacagaagtggaaatagcatgtaattactaatttagtttattcattagttttccaaaagtgaaataaagaattttccctttgacttcctacctggtaatttgaaagagataaatttgtgactaaaaagagtacttcacatcatacacaaataattaatgcaactgattgacccaagctagtgtgtgtgatattgtgatataataggaagtatatatttggtttctgaccctggttcctgcccttcagctcctaaaactcttggaatctccagagtgataagagtgtcttttgcatgctaatgaggtgactggtggctggggctggtcaccagaaagaccaaggcaggattagagggttgggattttcacccactcacaatctctggggagaagggaggggctgaaggttgagttgactgccaatggccaatggtttaatcaactcaccatgctgacataacaaagcctccattaaaacccaaaagggcagagtttggagagtttccagatagcagaacacggaaagatgcctggaggataggctcttgaagaaggtgtggaagctccgcactctttcccccatactttgtcctatgtgttttgtttttctttatcaatctgttcgtctgtatcctttgtcttatcctatgtaataaaccagtgtatgtaagtaagtgtttccctgagttctttgggctgctctagcaaattaattgaacctgaggaaaggtttgtgggaacctccaatctataattggatggtcagaagtacaggtgatagcaactggcatctgaagtgggaagggggcagttttgcatgactgatccctcaatctgtgggatctgatgctatttttaggtaaatagtatcagaattgaattgatttagaggaacccggtgtctgctggagaattgcttggtgtgggggaaaaatctccacatacctgatgtcagaagtaactgtgtaagacagaaggaaaaatgctttggagttttttgttttttctccccatctctatttatataggttaaaaatgtggctgggtgcatgcccatgatctgagcactttggaaggcccaggcaggaggataactagaggtcaggagttcaagaccagcctaggcaacacagtgagacccccccgcatctctaaaaaacaaacagagacaaatacataaataaatcagtacaagtacaagcctcataatccattatgaaagtgtcagagtgatgaatgccatgggcatagtaacagttaataaagaaaataatgtgttggaggaatatttaagataactgaggctgctacaagcaaaactacagaataatttcatcatatacatttttttttgtttccaaattagatacaagattaagccttgggtctccctggcagtggagggcgattctgatattcacatataactacccacagggcatggattctgagagatgctgataaaagaagttggtgtcttcttggcatttgtccccaaggatcttccaatacccagagaatctgcatttacacagatcatgctcccttgggagcttctcttgactgccccccacaccctcattcgtggcttttcctctttgatctcccacttcagtcctcacacctgtcaacactgtgcttattaccatgtggagtggttagaagatcttcccagagtcaagacatttccagggtcacccttctcttaggcatttcttggcacgactgtcctgaataaaggaaaggagatgaaggtgatgttgagaagcatctagagggctggagtcagggggaaccggctgaggctgttggatcaagttttagccactggtaaaagacctccaagctgcgaatgctattgccatctgtgtaaagtcgcctccgagattagaacatgccaaagactgaagaaagaggtctaggtagcataaagccatcatgtaattgaagtttcttccgtttccaaggacaggaagcgtgcaaatggctctgcgttctcagtaggggtggggctaagaagtgagcctgcaaatggtagtttgggcgaagacttgtgtgatgcatgcagggactcaaatttagtgtcctctgaacacaaacaccctctatgatccgggttaggtatcgctcctgtgaacgttcaaagaacacctttatattctgaggggacaccgttcatcatcagatcactgttgacggaagccaggtgacagctttgtatttcgtgttttcccctttagtaatgtaaaaatagaagttatttctcctttcttccaatgtaggatttttttttttgagagggtctctgtcacccaggctggagtgcagtgacacaaacacagctcactacatccttgacctcttgggttcagatggtcctcccgcctcagcctccttagtagctgggacgacaggcacattccaccggcccggctaatttctttttaaagtttttgtagagatagggctctcactatgttgcccagactggtcttgaactcctgagctcaagcgattctctcaccttggcctcccagagtgttgggattacaagcgcgagccaccacacccagcccagtgtaggaatgtttaattcctccacttgctatcaaagaaaactgctaactttcttatttcctaatttctctttttctatttgcttctccttaggttctgctcttgggtgctatctccttagttttgagaatatgaaggtttgtttagaaaaaaaaaagcagaaaaaattcactggaagatttcacatttgtatatatctttatgaaatgtgacagtgaagtgttagggtagagatatttgatctgattaccattaggataaaatcaaatctccttaccatgtcttacatgtgtacttgtccaatcttgtctcctataattgtccaaccaacccgttctgttccagcctcactggccttcttattctttcacgaagctcacactgtcctccagagccttgcactctcttttgcctggaatgctctcccagatcttaacatgataggaaaacaaaagacaactgtttgtcatgtctactacagtctcagccccatgaggcagagtccatgcccattttccttccatgcaacattcctggcacctagagagtgactgatgcataatggctggtaaaatatttgattaaaaaatattttagtgtatttcctcccccaaaatatacatacacaacagaggcagttattttgtctatatctttagcacattttaggcatttagtaaatttctgttgaatccatatggaattcttcagattgatctgtgaacactttagatttgaaaaaggagaaaatcataaaactaagggtaatggggagagagcaaaaccaaaggcagacatgggaagattctccttatacaaaatactttttccatgtctataatgaacccccaaattatctggatacttacaacagtggtagcaagggaatgtctcgttaatgcaggttctctattctcctcaattaatttcaggtccttaattgtgcatgacatatgaaacataaagggtgtttatttgctaatcaccagcattaattaattcaaagacttacctgagattctgtttgcgcaataaaaattaaaaagattactcagtaatacattgggagaggtgtaactggggcattaaaatacgaatgtgtgtctaattttcaaacatcataagtattttgaaagcacttatacataatcaattaatatatgttgttaactaaattcatatgaataatatgtgatataaattagtgttttgtattaatttcaagacaattagaaagagaatgtcaccatcactcttttgattcaatcaacagtccttagactggttccttgtaatgaatttaatgggttagtaaaagctgtgttatttgaaattatgtaattttgtttttttaatattttgctcaaatacttttcttattagtgtaaatgactgaagtattatgtaaattttaatactgattatctaaggtatatcattaaaacaaattatgagctgtgatcttgggcaaggtactcaaactgaaagatgttttccttatctgaaaatttagataataataattacctcatagtctgttaagaaaagcacatgtgataatatattttaatgtacaatatgtctggcacatattaaggtctaaaaaggataactgttactgttataccaataaatataataattttgataaatataatagtaatttaaatatattttttccaacatttattttaagttcaggggtacatgtgcaggatgtgcaggtttgttacataggtaaatgtgtgccatggtggtttgctgcacagatcatcccatcacctagttattaagcccagcatctgttagctattcttcctgatgctctccctcctcccatcccctacctccgacaggccccagtgtgtgttgttcccctccatgtgtccaagagttctcatcattcatctcccacctataatgagaactataaactcataattcagctcccacctataaatgagaacatatgatatttggttttctgttcctgtgttaatttgctaaggatggcctccagctccatccatgtccctgcaaagaacatgatcttattccttttcatggctacataatgcaccacattttctttatttagtctaccattgatgggcatttgggttgattccatgtctttgctattgtgaatagtgctgcaatgaacatatgcatgcatatgtcttttataatagagtaatttatattcttttggttatatacccagtaatgagattgctgggtcaaacagtatttctgtctctaggtctctgaggaattgccacactgtcttccacaatggttgaactagtttacactcccaccaacacaacctctccagcatctgttgttttttcactttttaatgataaccattcttactggtgtgagatggtatctcattacggttttggtttgcatttctctaatgatcagtgatattgagctttttttcatatgtttcatggccacatgtatgttttcttttgagaagtatgtgttcatgtcctttgcccattttttaatgggttttttcttgtaaatttaagttccttatagatgctgaattgtagatctttgtcagacgcatagattgaaaaattttctcccattctgtgggttgtctttttactgtgttggtagtttcttttgctgtgtagaagctctttactttaattagatcccatttgtcaatttttgcttttgttgcaattgtttttggcctcttcatcatgaaatctttgcccatgcctatgtcctgaatggtattgcctaggttttcttctagggtctttatagttttgggttttacatttaagtgtttaatccaacttgagttgatttttgtatatggtgtaaggaagaggtccagtttcaatcttctgcatatggctagccagttctcccagcaccatttattaaagagggaatcctttccccattgcttgtttttgtcagatttgttgaatatcagatgctagtaggtgtgtggtcttatttctgggttctgtattctgttccattggtctatatgtctgttcttgtaccagtaccatgctgttttagttactgtagccctgtagtatagtttgaagttgggtaatgtgatgccttcagctttgttctttttgcttaggattgccttggctcttcgagctctttttttggttccatgtgaattttaaaatagttttttaaaaattctttgaagaatgtcaatggtagtttaataagaatagcattaaatctataaattgctttgggtagtatggccattttcatgatattgattcttcctatccatgagtatggaatgtttttcactttgtttgtgtcatctctgatttctttgaagagtgatttgcagttttccttgaagaggttcttcacttaccttgttagctatattcctaggtattttattctatttgtggccaattgtgaatgggagatcatttgtgggtaatttaaatttttaaaatcaaatattttatcactcattatgcattattcttctctgggatagatagagatttcccagaactccgataagctttattttaacctatttacctctgattaatctgtttcacctcccggttgttactgtagtaactggggttattaatagcctcagagctaccaagacttctctgtaaaactgattatctttttcaggatagcatcctctaaatggttatgcaagatttatggttaagaatggaagtagctgattaaataattcaatgagctttactcaactatctacttttcacagcctctattttgtcccctgtggaagcacataacagggcttagctttggtgttgtagctctctgtcagaatacgcaattagtaggtctcatatataaaatttcatttcatcttaatattaatcccaccaaatggaagctatctaaactttaaagttaaaatgactgaggctaacagagaatatgtgatttgttgagggtcacaaacttaacgaattctccaactacgggacaaatgcatttttctcaaaatctgttaccttttatattatatcccagtgtctcatagtgccaagacaaggaaaaaatgaacaattcttagacaattatcttcttttccagggaatatctttccattttctttttcccatccctctcctaccctccccagctacagtcaaacctcaaatataagaaccagagaatttaaataaatgtcacaagaagaaacatcctgaatcgtgttcttcttctggttcctgaaacttccaaacatatcttcagcgttatcacaaagttcagtgatacttaggaataacctagtgctggacaccaagtagatgaccaatgaataatttttgtatttttagtagagacggggtttcacgatgttggccagtctggtctcgaactcctgacctcaggtgatccacccgccttggcctcccaaagtgctgggattacaggcatgagccaccgcacccggcccagaaacagatttcttatctgaaatatcagaaggcagaaaacaacaagagggaaaaaaggctgctaacttaacgcatggggaagcagggtgtgggcaggaaatgcagtgtaagagaggagatttgtacagggcgatggaagagacaatggagagaagacaatctgagcagaagctgtgaggagtagatagatgctggggaaagggactgctaattatggtgttattttaaaactagctttgtgtttaaaattctcattgcaacaccctcagagacctccactgcactgcaaaaatcttggatttatattttgtttatcttctggtgtaaaactgagctgaagcacactgattctactagaagaagtcaatgtcctaggaagacattgacagctgtagggatgttaactgggtcatcttcaccagtaggtggggacattgcactttaaaaattcaagggagctgctgctttcccttctctcctggccccttggcaggtctagatttgagggatcagcatttcttgagggtggtaacccagccactcttttttcccttactcttccttccatgtgttcaaaatatgatgcaatctgagatgtggttatgggtgtttgagaagcaaagaagcatgactggagcaggagttaaagtctgcttttgtttgagaactgaagagctcagtcttttacacgctttcacagataagagattggtactataaaattacatgcttaaaacaaacttcgctgctgtcattctaatgcaagccactatcctttttcacattgagcatcctgccaccatctgcagcattcttgatatttcagtaagaattaaattttattttgcaatcagtattttaaatttatcaggatacctgtatatagtttgaggattaaacaataaagatgtattttaatgaaaacaagagcccttcatgccattcctttcctccactagcattatccccaggtcaatgacttttaatggtaatatgtgtatctttgtgtatgtggggtattaatttagacatcagttatctaattatctgaaagcagataatttagaccaccaacaattttatgtctctggcatccttcttgcaattttattatattactatgtttagttcctctgtaggtaatccctgtatttaaaaaaaaaacaaagaaaacctacacctaagtatattgtatttaaactgtaaaaaaagttgaaatacataaatactgcttagaaaagcaaagtgggatgggaaaagtacaagttattacattttagtatatttcttaaaaatgaatataacaggtagatatttgttagtatgcattacaaaatttgggcaacatagttatgaagtatatttggatatttttcaatacatatattacacaaaggaagaaataaagtactgctcaaatcaatggattaaataacctagttgaaatattggaaagtagatgaacagtaattcacagaagaaactcaaatggaaaacagcatatgcaaagatggccaactttctctataatatttgacacagtaatattatgtcatttcagtttaaataaaattatacattgataaaaatgtgaaatcacgtctttgaggggttactaagaaactgtctagaagcattgttctagaagctgatgtggttttggaagatcaagtgtgaatgtccaaaggcacttctgttgaataaaacgccaagtggaggaattgaagatccctgattgtggaagtatccaactgtttagaactcaactgaaatcctgaatgatagttctctacatgtagcaggaggagcaagtgactcatggaaataacgggtttatttaaataaagatagcctttatgtggacatcaaattcatcaatgaatgtatccatttatttgtcaaataattatttagctcctactaagtgctacatgctattccagataacctagtcaaaaaggcaaatgtgtccctacctttatgagctttaattctagcaggaactaaaaaaagtcacataataaacagacataaaatgcagtgttaggttgtgattcttgctatgaagctacaaaagaggaaagctgagtaagggaataaagaaacaaagtgcttatcagtagtgaacttccatgcaggccatgacaggctcatttcaaaagaagcagaaatatttttattattgtttccttgggttattagtgtcacatgtaagaatagtgcactagatttactaccacagatttttgtacttatacgttattttgaacaaaataacaacgtctagatagttcctttcctcctgcaagaactaagtgtatgtaagtcctctcttttgtaatctagtttatttttttcacatgtgaggatcccagatactattaggatgccttcattgctaattggatcttggaaaatatactttcttgctttacaaaatatatttccttttaagcctcagagtaaattttgaaatgatctacccatggattagtcctctgattttaactagtatcattattctagctgtaaaggacatctattcaaactgtgtacaggtaagattatccagggggtatagtttagagcacccatataattttcaatagattatgtgattttacaagaatctatcaagttaatgtttcaagaatattgataattacttttagacgttttgctgaaaaaatacaaatagacagggagtccatagtaatagggtgggtctaaagttatgtagtctgagtgaggacatgggatgttaagtccagagacaggccatatgcagacagccagaacaatgtctcaaaatctacaaatggctgggcctggatcagtaattcttatgtgaaggatgccagaaatgagcaacgtaaaccttaacagagtctgaaaacacatctcaaggtagaggttagaatgaatccacctgccatcccagcctgatacacatgctagaatgggttatagaaatgggctaacaggaaaaaagtcattgaaatcatggaaaagaccgaaatgaaaaatgtgagataatataaaggtccatatatgttatttatttcagtaaaatgcaaatagacttgacttgtgatcaaaagacagagattgacaaattgaatgcaaaaatacaaattcagattatactgtttacaagacatatgtctaaagcataaaagtcatttcagagattgagtgtaaaagacagaaaggatatatcatgcaaatactaattttgaaaaatgatatcaatttattaatgtaaaaaacaaattttaaggaaaaaaggcattgtagatttttcttcatctctttattttgagcctgtgtgtcattgcatgtgagatgagtctcttgaagacagcataccaatacatcttggttctttatccagcttgtcactctgtgtcttttaattggggtatttagcccatttacatttaaggttagtattgatatgtgtggatttactcctgtcatcatgatgttagctggttaatttgcagacttgtttatgtggttgctttatagtgtttttgtagtggctggtaacagtctttccttttcatatttagtgcttccttcagaagctcttgtaaggtaggtttggtggtaatgaatttgctcagcatttgcctgtctgaaaaggatcttatttctccttcaatatgaggcttcatttggccaattatgaaactctgagttggaatttcttttctttatgaatattgaatattggcctccaatctcttctgcttgtagggttttagctgagaggtctgctgttagtctgatggacttccctttgtaggtgacctgatctttctctctagttgtttttattttttattttttaacattttttctttcattttgaccttggggaagctgataattgtgtgtcttggggataaaagtcttgtgaagtatcttattggggttctctacatttcctgaatttgaatgttggcctctctagctagattggggaagttctcatggatgatatcctgaactatgttttccaagttggttccattctctccatctctttcagggacaccaatcagtcatagatgtggtgtctttacataaccccatatttctcagaggttttgttcatcattggggaagacagtgtggagattcttcaaagacctaaagacagaaataccattcaacccagcaatcttattactgggtatatacccaaaggaatataaatctttctgttataaaggcacatgcatgtatatgttcattgcagcatattcacaatagcaaagacatggaatcaacctaaatgcccatcaatgatagactagataaataaaatgtggtacatatacaccatggaatactatgcagccataaagaaacaaaatcatgtcctttgcagagacatggatgaagctgaaagtcattatccctagcaaactaatgggggaacagaaaactgaatactgtatgtcctcacttataaataggagctaaattatgagaacacatgaattcataaaggaaaacaacacacactggggcctatcagagggtggagagtgggaagagggagaggatcaggaaaaataactaataagtactaggcttaataactgtttgacaaaataatctgtacaacaaacctccatgacacaggttacctatgtaacaaaactgcacatgtaccccgaacttaaaataatagttaagaaaagaaaacaggccgggcacggtggctcacgcctgtaatcccagcactttgggaggccgagacgggcggatcacgaggtcaggagatcgagactatcctggctgacacagtgaaaccccgtctctactaaaaatacaaaaaattagccgggcatggtggtgcccgcctgtagtcccagctactcgggaggctgaggcaggagaatggcgtgaacccgggaggcggagcttgcagtgagccgagatcgcgccactgcgctccagcctgggcgacagagcgaaactccgtctcaaaaaaaaaaaaaaaaaaaaaaagaaaacaaacaaacaaaaagcaaattaaaaataaaagctatggttgaatcaatgatgacattgaggaataaaacaagcattaggatcatgacattagcacaaagccattcatgagggatctgcccccatggtctaaacatctcccattaggccctgcctccaacattggggatcaaatttcaacatgagatttggagtggacaaatatccaaactgtggatgggaatgcatgtggaagaaatacttaatacaattgcatttaaaaagtagagagggtaaaatatgctaatggtactagagatacggactgtatccttcactcaaagtggtaaaacatcaataccagtagactgtgataagttatatgtatatattgtaataagtacaaccaccaccaagaaagctatatgaagcaatgtactaaaaaggattaaaaagtatgagtgtagatacaaaagttcttcctgagaacttcaaataagatagatatgcatatggtgagtagggctgaagtcttgacttctatgcctgaaagtaggcattattggctgggaatttaattcctaagtgggaaagaaaccaaaagtgctctatggaggaaagacagccaaattttgactttctgcttctggctaggagctgaggttgggctccccatgattttaaaggaggttgaggagaatgttttcaaacacttgtatgctatagatataaggaagtgagaagacacagaataactttctcaaaaggaactgaagcaaataaaaaacaactgtcctgagaagattgttattgttccagatattacaacaggacaataaatctgaatgatcactgaagaactgggattttgattggaagcctgatgggctgaggtggagtggctaaataaaacctctggacagggacagtggagtacagaaaagaagaggagggaggagagtaaaagagatgggcaatgctatggtttgaatgtttattttctctgaaactcatattgaaacttaatccccatagtaatagtattaagagggctgtaaatccaactatggtatttgagaggtggcacctttgggaagtaattaggattagatgaggtcttgagggtggggcattgagaggagaaacagagaccttgagccatacccctttgccctcttgtcacatgatgctctgcacctcatcagaactcagcagagggcccaccaataagaagactctcaccagatgctggcaccatgctctgggacttctcatcctccagaatcataagagatacattttgtttcttcataaattacccaatttttggcattctgttacaagcaacaagaaacagactaaggcagaaaattggtactaaaaagttgggctgttgctaataacaaatatctgaaaatgtggaagcagctgtggaactgggtaatgggtagaggttaaaagaactcaaaaaggcaggcgagaaaaagcctgtattgccttaaatgtcaattctggtgataaagggtgattttggtgagggcttagaagaagtcaagaagactaggaaaagtctggaactcctttgtgatgatttgagtggtcaggaccagaatgtcaatagaaatatggacagtaagggctgttctgctgaggtctcaggtctgaggaacaaggaattggaaactggagtaaaggccatccttgtaataaatgggtgaaaaacttggctctgaattgtgtctatatctgatggttttattaggctatatggcagaagaaatatctaagcagcaaagcagtcaggcagctgcatggctacttttaactgcttacattaaagctgtgagaggtaaaaaataacttaaaggtggaatttataattaaaagggaagctaagtggaaagattaggaaattttgcagcctggccctgaaagagcattttcaacagaggaaaccaagggtgtgtctgaaggaatgattgttaaggagggactgattgataaggagaattgtatgaatagaataaagccagaagctattcatcaagacaatgggagacaaacactgaatgcactttagagatcttcaagtctacccctgccatcacaggcccagagctctaggaggaaagaatggtttcaggagacaggcctggggtgtcctccatgggcttgctgcccaatgccacctcagggcagtgcttccctcatcctggttgctccagccatagctcaagtggccccagatgtgactcatattgtagctgcagaaggcacaagcagtaagccttggcaatgtccacatgcatgtggtgctatttctgcaggtcttcagaatgcaagactagtgggaaggcatagaaatctccacctagatttcaaaggatgtatcagactgcctgggaacccaaggagaaaactgccacaggggcagggccaccactgtggggaaaagcaagagggatcagattgttactgtgtctgtgtagaaagaagtagacataggagactccattttgttctgcactaagaaaaattcttctgccttgagatgctgttaatctatgaccttacccccaacaccgtgctctctgaaacatgtgctgtgtcgaactcagggttaaatggattaagggttgtgcaagatgtgctttgttaaacagatgcttgaaggcagcatgctccttaagagtcatcaccactccctaatctcaagtacccagggacacaaacactgcggaaggctgcagggacctctgcctaggaaagccaggtattgtccaaggtttctccccatgggatagtctgaaatatggcctcgtgggaagggaaagacctgaccgtcccccagcccgacacccgtaaagggtctgtgctgaggaggattagtataagaggaagacatgcctcttgcagttgagacaagaggaaggcatctgtctcctgcccatccctgggcaatggaatgtctcggtataaaacccgattgtacgttccatctactgagatagggaaaaaccgccttaagactggaggtgagacatgcaggcagcaatactgctttgtaaagcattgagatgtttatgtgtatgcatatctagagcacagcacttgattctttaccttgtctatgatgcaaagacctttgttcacgtgtttgtctgctgaccctctccccactattgtcttgtgaccctgacacatccccctctctgagaaacacccacgaatgatcaataaatatgaagggaactcagaagccggcgggatcctccatatgctgaacgctggtcccctgggtccccttatttctttctctatactttgtctctgtgtctttttcttttccaagtctctcgttccacctaacgagaaacacccacaggtgtggaggggcgacccaccccttcaaccaccaagagcctctgctagggcaatgctgagaggaactgtggggttggaactgctacagggagtcctccccagggaaatatctagtggtgctgtgacagtgggactgccaccaagactccaaaactgtagagctaccagcatgcagtcccagcttcgaaaacccaaggcacctgactccaacccatgagaacagccatatatgggctgcaaccagcaaagccatgagggcagggttgcctgaggtcttgggggcccaacttctgcccctgtgtgctcaggatgaggaacatggagtcaaaagacattatttccagctttaaaatttaatgtctttccctgttgagtttcagacttccttgaggcctgttacttctttcttctggcccatttctcctgtcccagcattgtatcttggaggtagataattggctttagtatctcaggctcacagataaggactttggacttttggacttttgagttggtactagagaaagttaagactttggggctctggagataaaatgaatgtatttgaatgtgagaagaatatgagttttgaggctgcaggggtgaaatgctatggtttgaaagtttgctcctctaaatcttatgtagaaacttaatccctattgtaacagtataaaagggtaagaaaacagaccatgatattttaggggtgggagatgtgagaagtaattagtattagatgaggtcatgaggatggggtgatgggttactaagggtttgataagaggagaaagagatacttgaggtagccctctcagcctgcttgctatgtgatgccttgcaccacaatgggactctgcagagggtccccactagcaaggaggctctcaccagatgctggcaccatgctcttggacttcccagcctccagaaataaattttgattctttataaattacccagtttcaggtattctattgcaatcatcaggaaattaattaacacagcaaaatcgacatctagaatacaaaataatcccagcactttgggaggccgaggcaggcggattacctgagttcaggagtttgagaccagcctggccaacatggggaaaccctgtctctactaaaaatacaaaaattagccgggtgtggtggtacatgcctgtaatcccagctactcaggaggctgaggcaggagaatcgcttcaacccaggagatggaagttgcagagtgagccaagattgtgccactgcactccagcctgggcaatggagtaagactctgtctcaaaaaaaataataataatatacagtaattggagatgaaattaatttaagtgttctggtatatactatgtaagtatatgaagtataaataagtagagtgcagatgacaccaataacaatgacttcattgctattctgtctcagtgaagaaggggtcctgtaggtatgattaattattctcttaggtgtgtcttctcaatgccagcaaagctaggtgtgggtgaaaaaaataccacctagtcttttttgttaagtgactataaatatcatcagatccctgtgcttccctgtctctatccccagggattcaatgacatttatacacttggttcccaggtgagattttaattaataaactaatctcatgactgttagcaattataattagatattctgtcaagttcctaattctcacatcttcaagtcctgtaatttggtatgaaggcactgcgaatttggactttgagctaacaagatttagacaggatattggccttgatctgaggctgtaatggaatgagactttggggggcccttgagaagggattaatgtattttacatttgagagggacatgaattacaggtggccagagggctgaagaggtgagaaggaaagcagaattctaagatggcccccaggaatatctatcaccccctgttgtacataccttataaaattattttcctttaaatgtgggtggaacctaccgagaccagcttcgtcagggagaccctaacccagcagcgctagaggaattaaagacacacacacagaaatgtagaggtgtgaagtgggaaatcagggatctcacagccttcagagctgagagccctgaacagagatttactcacatatttattaatagcaaaccagtcattagcattgtttctatagatattaaattaactaaaagtattcctatgggaaacgaagggatgggctgaattaattgcagcaggaacatgctcttaagacatagattgctcatgcttttgtttgtggcttaagaatgcctttaagtggttttctgccttgggcaggccaggtgttccttgccctcattcccgtaaacccacaaccttccagcttgggcgttaaggccattatggacatgttacagtgctgcagagattttatttatggccagtttatggccataaactgggccataaatttggggccagtttatggccagattttggggggcttgctcccaatagtaaccagtaaatttaatggtatgatcactactgtgattgggttatgttttgactgcaattagccttatgaaaaggaaattattgtaggtgagcatgaactaattaggtgagcccttgaaagggactgaacttttcttgaagagggagattaaacatgagaaagactctgtattactgactttgaagatgtagagggccatgtggcaaggaactgagagtggtcactgggagctgatactgatccctggctgatagccggcttgaaaacatggacctcagtcatacgtggaaataaattctgtcaacaggcagtgagcttggaagaggactccatattcaaatgagaattataaggtcagcttgtgacttcagtcttgtgagatcctaagcagagagcccagttgagctttgcctagacttctgacctagaaaactgagataataaatgggtgttgttttaagctgcaaagtttctactaatttgttatgacagtggctagaaaattaatacaatatgctttgtttatttaaattttacatactgcaccataagcacctttgacataaacagaatgcttaaaattgatatacctttcacatattaattctttactttttcttagtatagtctaagaatactttcctgtacggtttctttctttgttttgttatttaaactcatctcaccactttttaataaaataaatatttactttttttttctatatttttgttgatggctttcatgaaacttcggttcttgtcttcttagtttaaaagaatttaaacaacagacacacagcaaaggagatacaacatagagcaatttcttgcaaaggagaaaggatactctgaaagttaggtgcagaatcaacagtacaccccaagagacaattcagggcaggttgcttgtgcgggtgagacagtgttgaatgttactggggaaactccctttatgggagtcttacatgattattcataagggggtgggaagatgtgttactagcaagcatgttctgggtggttcctcctcagttctgagttccttctcatttaaacttttaatctgcctcagtataatctctgtatgtgtgtatgtatgggctctttttactatcccactaactcactaattgacccaacactatttttagtaatttttcctattccactggattaaaagtttgctttattatgcactacattcttaatttatccaacataaatgcaggataacttgttctatccttgaaagcagtcccagtatgatgttctttagagaggccagagcaaatttccccatactccatttcaaatacttcaaattatattgcaacctcttgaaaaatatcaaattaggattgtatttctaacaccaagaaaaatgatttaaaattcttttaaaatagcttcttgtcctaaaaatctcaccataatttcctcatcactatgctgctttctctttcattccatattggtgtcatgacaatcaagtatatttcaaaaaacttgtttccggaccccttacatcccactgagttccattcctcattagctacagcccattaccctacaaatttggatagactccagaagagtagagtgggcccttatgtactttgaagaagtgaagaatataacctgtaacattgaaggcttcttagaaatatgtttgtctcccatcccaaaattttctcaaagggtttgcgacttcctagaaatgtaatacagtggtcctcccttatcgatggtttcactttccacagtttcagttactggtggtcaatcaatcacagtgtgaaaatataggtgtttagtacaataagatattttgagaagaggggagagagaaagagacagagaaagagagagagagatctcatttacataacttttattacagtatattgttataattgttctattttattattagttattgttgttaacctatgactgcacaatttgtaaattaaactatatcatatgtttgtatgtgtagaaaaacatagcatatacagagtttggtacatgccttcaggcatcctttggggtgccttgcaacatatctcccatggataagagggggctattgtaaacaaaattttcaatttcattaattgtggcataaattaggttctgtttatgtgcagccaatatcattccacagttgtcctttttttggggcactatgaacatgttttaattgtttagctttataatcatttgtaaacatctattagagtacctctccttatttttatcaatagttgtttttgtataccgctcttgaaagttagaaacattttgttaataaaactgtcttattactatttagattaaagcatcaccaaatccatgtattttgtctggaaaagtgacacaaattgccctgtccaagaaagtggtatcattgtttactaaacttctttctgtccttaagtaaatttctattcttttctgtggattgcacacatgactgctttgatattttgtatatttattgctcttttcaataattttttttctggaatggattcattgacctaatctgccagagagaattaatgaggccccacatcttctcattagttggagaagaaagtatttaatggtttaacttgaacgtgacttttgtgaatcttttttttttttttttttaaagcagaatcctgtatttggttacattctggtctagtgaccacttccttcaggtaaagcaagcttccctgtctggaacagccaggcatgtgataaaaaatttcctttgtggtcacttagttattattcctcttgtcttgagtgtctgggctgctattttcatgtatttacatccaaatgaagtctttctttccaactttttatagtatgttttgattcacaaaatattttagccttatctacaatataataatttctcacaaatgcaaagaatataggtttgtacagttttgaagtaatattggcaaaagagtatgaagcagagtgcccatatttaaatataactttcaacatgttagtctttctataggtgttttcaggataataaaaattaatttgattgatatagacttgggggcaatatatgagaaacaggctctgctctaaaggataggatgagaggtgggcagggaggatttgtatggtttgaattccaggcacacacgctaactgctaatttggcatcatccaccaggttgaatattttcatgaaattctgtcttacatctctgctaatcctaaaacaaagaatgaggatcatttcaggtgagtctaagtcaggagaaactattaaaattgttatattcttcatttaatttttttctatgattattttttcttctttttatactaattagaataggccaaactgctgcaacaaatagactaaaatgtgtattgtggctgaaatatagtagaagtttataactcactaatgtagcagaaggaggatattgaagatttgtgagtcacttttctccaggtggtgattcagaattccaagctcccatagtccaatatggtgcctttcattttttttcctgagaaaattaacacattttaatttttcctcaagaagggaggtacaagagtgatcaattgtgatctagaagattaaggcaagaaagttagtgaaatttgctacagtgtctactattatagttgtcattatgactgtaactaatatttgtttccctccttcacaagccattcttgattcccctcatcctctgaatttagtctagtttgtttttctgttttggtgacagagacaactattccagaagggtctatgttactatttactctgttcttgaattatgattgttttagtgtctactgacagacatgaccatgcatagaagcactaaaagactattgtattttcatctgggatagtagtctctgtcactaaaccagaagaacaacctagtttttagacctgttcaagcttggttccaaaggaaccacttctgctgcagatggattgtggttggtatccccaaacttacgactccatggatttatagctcttcgcatcatatggtcaatttaaggcacatggtcagtgtgctaagtgcctatcaggaagaaatgaacacttggtcatagttttagaactatgaaaggaaattaaatcttgggactccaactcattaagcctaagggaaaagttaatctgggaacggggttgcgaaaacccgcctccccctttttggttcctaaataagatggctacaaaatgaaaagctacatgcctccctcatattttgtccacaaggaaagtccttgtgagctgcaagatctttactctaaggtgtttctgttaaaattttaccatggcaatgtaaattggtagcttatctttacaggtgtagtcacgcccctgcccagaagacacaaatgcatatcttttttttttttctttttttttttttgagacggagtctcgctttgtcatgctggctggagtgcagtggcgcgatcttggctcactgcaacctccacctcccgggttcaagtgattctcctgcctcagcctcccaagtagctgagattacaggcatctgccaccatgcctggctaattttttttttttgtacttttagtagagacagggtttcaccatgttggccaggcctgtttcaaactcctgaccccaagtgatctgcctgcctcagcatccccaaatgctaggattacaggcatgagccaccgcgcccggccacaaacgcatatctaattgttccccttcccccgttttgtctatgtcatcttatgtaaaaaaaatgcagattaactgagccagacaaaggcatgaatgactatttttccttaccctcctcttacatgaaaattgtgtacttctcaatatccctaccctttccccttaaatttagagccctcaaaattatcttcggagaaaggtatagacctgtctcctgggtgcttattcttaactttggcaaataaacctcctaaaatgattgagacttgccatttttctcgattgacagaacacatgagttcatgcaaagttactgttggagaagttttcctgtggttgttttttggaacatgtaatatgaatgaagtgatcaagagtttgagctgtgacttacactttaggctataatagagtaattggtgcggttaagacttcatctctcctgggcagctttcttgagctttaggagactgactcacaatggagctgaggcttcttctgtcccttgctactgatctgtaagtaataaaactgcttcacataatttgtgtgtgagtgtgttctgtttcaccagactcagataaacaggtagccagtgcatggtggacataaacagtagctcagaatgcagtgggaagaagtatctggacctcttttcctggtggttggcatagtgatgatcttttctattctccatgcagtggaagtcctccctttcctcccttggtattggtaattagtaaacctgcttcataaactgtgattaatatactaaaatctctaatggaaaaggtagacaacatgcaagattagacagtttcagcagagatatgaaagctttaaggatgaatgaaatggaaataaaataaaaataaattaacaaaaataaagaatgcatttgacaagctcatcagcaaatgtggtacagccctgggaagaatcagtgagtttgaaatagatcaataaaaattacccagagtgaaacacaaagagagaaagagagtaaaagtacattaaaaaaataagcctggcacaatgtttcacatctgtaatctcagcactttgggaggctgaggtgggaggaatgcttgaacctaaagagcagcctgggcaacataaggagaccttgtctacaaagagagaaaaattaagtgggcaagcatggtgctggtattcccagctactcaagaggctaagacgggaggactgcctgagttgggggcgagggtgggggatgaagtgagctgtgatcgcaccactgcattccagcctgggcaacagagtgacaccctgtctcaaaacaaacaaacaaacaaacaaacaaacaaaggtgatgtaaccattcaatacagcactgcagctcttggatgctctgttttgtttttcccctgctcttcttttctctttgtatttcacattgggtaatttttattaggtatcttattgaattagtttgttaaaagataaacacattatttcggttggctttgcttttttaacattatattttgaaataattgtagattcaaagggagttaccaagatagaacaaaaagattctgtatagccttcatccagttttccccaattgtaacatcttacataactaaagtgcaatatcaaaaccaggaaattatcctgacatatatagtcaaacgattttcaacaggagtgccagggccattaaatgcggaaaggacagccttttcaacaatggtgctgggaaaactggaagtccacatacaaaagaatgaaactggactcttaccctacattatagacaaaatgaactcaaaatgaatcaaagacctaaatgtgaaaactaaaaccataaaactcttagaaaaaaaatagggaaaatcttcatgatatttgattaggcaatgatttcttggatataacaccgagggcataggcaagaaatgaaaaaaatatatataaattggactccatcaaaatttacaacttctaattgaggcatggaaaactaaataccatatgttttgatttgtaagtaggagctaagtgggtactaagctatgggtactcaaaggcatacagaatggtataaaggacaatggagagtaagaaattggggaggatgggaaggagggtgaaggataaaaaactacatattgagtacaatgcacactactcaggtaacaggttcactaaaattccaggcttcaccactatacaattcatccatataacaaaaaaccacttgtaacctaaaagctattgaattaaattatattaaaattaaaaaattattattgagcatctactatgtgttcaaactattttagatgctatatatttgccacttcatttaatccttggcattactctatggaatagataatattctcattttgcagttaaagaaactcatactcagagagattaacttggatttatgagcaatgttgacattataaagtagaggcaggaagaccagttaggatgcttttgcagaaattaacttgagtggaattgtcggtctgtgagaatagaaaatgaatcttttgggaagattctacaatgttattgtttttgcataagtgactttttcctctactccctcttttcacatgtaaaatgtagatttactgaggctaatcagactcacaagaatgtaaccacttgtgtcattgcctaccttccctccttttttttttttttttcctctctctttcccttcctgcttactctttctttttaaacattgaagttctcaaaaccctctttggaataagcattgatcacagatgctcctgtgattcgtgtttttcccaggtgcatcctgaaccttggcaaaataaacctctaattgattgagacctgcctcagtcacttttcggcttacaccaggatttctttctttttaaagcctgaatagaattccattgtgtatacatacattatctttacccattcatctgctgaatgacacaggttgatttcataccttgactattgtgcataatgctgcaatgaacatgggagtgtggatatattttcaacctactgatttaaaatcctttgtctgtatcctggaagtgggattgctacatcatatggcagttctattttaactttttgaagaaccttcataatgttttccctagtggccatactaatttacattcccaccaacagtgtgcaaatgttcccttatctccacgtccttgttaacacttgttattttttgtctttttgataatagtcatcctgaaaagcatggattgatatgtcattgaggtttaaattgaatatcttaagttttcctatttgaggatatgagtagtccccccaaaatattactactaatgttgcttttttgcatgaaccatgaccttgagctgagctggacacttgaattcttgagtacttggacatgagcttaaataggactgaaatattttttacatacctgaatattagttcttctctctactggtaagaacttgtagaagaagacattataaagatctcatagaaagatatttaaggtttgtctgggaatgaaggcacatgatgactacaaatctagaagctggggaagagttgtctctggaaatatcccaggcattactagggaaccagaagtagagacgaacagatatgttgcaaagagtgacatgtgtaggttagctctgggtgatgaaatcgtcagtggtccagctgaggtgatgcatggatgagattgactggaagaagaaacctgtagaaacagatcaggaaacaaagctccgttgtacacacgtccatagcaggcagcctgggttttcatcccagtcttcttctgttttcaagggccatttccatactgcatgagaagccatgagactggtgggctctggactcctgtgccagagatcactcaccttccccatttcccccaagtgtcccaaatgccttgtatcatctgattttctatcttcctgctaaagcttttcccatactcctagtccttcaccctgcggtatcctccaagtccttacctgacttccactatggagtctccccatggttacttgcttgaaggaggcactgtttgagcacagcctctgaatgctacagactctctcttcagattttctaaattgtcattttaaagagataactgtttaaagagaaaaggcctaccttatatgtgtcatgaaaaattcatgtaaccggttacctaaaagttgatataagagaaatatgtaagtagcttcacaaggttttgaaaaatttggagataattacttgataaatttttattaaaggaaaatgatattctggggctgtatttctgttaccactggcattaaggaggccacagaacctttctgactctacagtgtttcttgattctggaagtaattgcaggacagagtcctggataacccttctggtgacaggatgactcctgtgtttacattcaactgcactgaccaagcacagattctaagagatgctgaccagggaagatgatttctcccttgattccacaaagaaggagtccacaacctttttctgccctgaaagaagagacaatgtgccctggggagtctccctagtgtaaccttgacccgtaataacagcagtgtctttatcccatcttcccacatggggtgtgtgtggtctcatcctaagcgctctgtccccatcagaggccgggcaggtgatttgggtgaggcattcagaatcaggatgcttgtctgagttgccttcctctggccaggccaatagtggctgccctgagtaatggagcagggataggaacattgcaaagaactgtagagaaggctggatcagggggacacaactggcagaagccccaaaccaaagccttttagattaggtgttttttttttgttgttgttttgttttgagacagagttttgttcttgtcccccaggctggagtgcaatggagtgcaatggtgcgaactcagctcactgcaacctctgcctcctgggttcaagcgattcgcctgcctcagcctactgagtaattgagattacaggcatgcaccaccacactcggctaattttttttatttttggtagagacgggtttcaccatgttggccaggctggtctcaaattcctgacctcaagtgatctgcctgccttggcctcctgaagcgctagaaaattacaggggtgagccactgcgcctggcctcagatgaggttttagccagtcagaaaatggctctaagctgacactttcgttgctagttgaaaagtctgtgtggccaggtgtggtggctcacacctataatcccagtgctttgggaggccgaggtgggaggattgcttgaggccaggacattgaaaccaacctgggcaacatagcaaaaccctatttctataaaaatttttttaaaaattagacagaatggcggtgtgtgcctgtactcccagctacttgggaggctcagacaggaggatcacttgagcctaagaggttgaggctgcagtgtgccatgatcatgccagtgtactccagcctaggtgatagagccagaccctgtccctaaaaaagaaaagaaaagaaaaaaggaaaataaaaaaaaaggaaaagaaaagaaaaaagtctgtttgaagaggcccatgagactggggagtccctaggtttgacgtagactttgcctcacagccccagaataaacctgagggaagtttctccctttgaacaggaagaaggggtgggccagaggcctctattccgagggacgctgaggtggggactgagaggacattgagggcatcttcaggtccctctctgcctattctttcttgcccccagttccgttctaggtctgagtttgatgttcctcctttatgcttccatcgcaccagtggagaccctccttagactgggggttaccctgatcctgagtacaccactgctgctagaagcccagtaacaacgttcccagtctcaggtgatctaaatctatgcacagaataatacagaatattagagtggctcaatgctttcatgtgccactattgcaaacctcttgctaccgtctcttccctgtttctttttacctggtaaacatattctgcttttagatgctctctatcttctactttactaatatacagggaagagtgggaggaagggagacaagaagagaggtggagatatttattgtcttggttaggattaccagtaatgtttgtcaggcattgttttaattgctttataaccattagtactatccctagccatgggcaacgtaagcctgataagtaagaaatttatttataaaaacacattggtacctctgccattttggatttgatgtttagggctggcccaatatgacctgtaactctaaacatttgctccatcattaatacgattcagcccccaggaaattcttcttcacagcttttgttctctatcttcaaaactaaatgtgactgtgtctgaatactgtaaaatttgtgtattgtgcctttgctcatatcagatgcacctgtttcatggttcagggaggatttaagcagctgaagaacttacaagagaaaagtcaacaaatactttcactcgaagagcatgaatgcaataccttcttgcataataaagaatcacttgccagtagggctgggtgtcaacttttttttttcttgttcctcctattagcttgatagttacacataacagtggaggaggcttttgtaatattaaactagtcatattaatgttaaatttgtatatgtgaagatctagatgtaaaatgcataaaacatgatccacattttgcaaagagaagcctgggggtgaaaaggagttcagtaatttgttgactctcataaagcacattagtggtagaactgcaactcaccatcatttccttctaagaactttgctcttctcaccaaaacttaaggctcctcagagtgtctaatagaagtgaacatttctgtgacaattttctgttccctgaaatatgatcctcacttaatttgccctactaaaactcccaagtataagaacaataggttgtaagatgtctactcttgaatcacatttgtcttttgcttcttaaaacccctaagccattcaatcttcagctattcagaaatcttcacctcaaatgttcatctagtgcaatttgaagaagaaacagtgccaggcattggagtgagaatcttcacagaaaaatgtctgcccagaggcagatgaggtccttcagctccagtgctgattggttcctttcctagggactccccaatcctaccacacatggaaacatccagaggtttttattctttccggcaggtacataagatccattaggtttgagctgtgttgactaccactgctttttccttggtctcacttatgtcttggaagatggctctgcagatccctggaggcttttgggcagcagctgtgaccgtgatgctggtgatgctgagcaccccagtggctgaggccagagactttcccagtaagtgcagggcagctgctctcgagagccaccactgtgggaacaggctctccttgggttggagtatgggggatggtgatctccatgatctcagaacacagtcttttatcaccatttattctttttgggaaatagagctatgttgcatttttatttccaccttataatgggtgaggtgaggataatccaaccccaatcccacaggtttaagcctgaaggaggagagaggaaagaggagacaaagtgtgcattcactacctgtgacaggacaaaatgaccatggcactccacggttatgcatttccccaaagatatgcatttccccaaagacacagtaggatttttctgcactgggaaaatgtaaggcagcaatggtgtctgtagtctctgtattggaggtaaaggagtctatactactgactcgagtggagagtttgtggaggcaaactcttagtactgagggaaggtgactggatgaccacagacagggagtcttactttgggtttcactgatttatgggcaaaaggtgacttgagtgggattcagggacctgagttgatggtggactgaatttagtatgataggaaggaggaagtaaagaagggaaataatacatattgagaaaccactccattcagacacaggacagtactttctataaatcctctctcactcctcctaacatcctatgtgtaggtatcatgattttccttttatgtaattatacttgtgatatggatattctgttaagtaacctgcccaagctggtgattgactcagtttaattggaccctatagaattcaaaagcttgggctctttccatgaataaatgtttccttctaggactccggaggtgtaggtcctttctaacacagaagtgagtgaacctcacagggcacttgggcgggtatagcagaaagagagtaaatccaggcatgggtttacttggtctcttgcccagggaccaagagaatacttacatcaggatgagaacaagcttaattcctgaacctttctcgttattcccttgaactctcaaatttatgtggataactctgtctctgagattcccaagagctccatggaaaatgggatttcatacgagaacgccctgatctaagagcagaggtcaatgtcgaatcggtccgactgccctcttcacttggttcacaggctcaggcagggactgggctttccctcttacctccctaaaggaaggcagattcccgaggccctcagagagggcgggcagggctggggcagagatgtctcgaggatcccaggtccggagcacgaggcacgggcccagccaagaactcaatttcgcgtggacgggtttcgcagctgctggccgggtcagggcagcggctgaagggtgcggtccggctgggggctggggctagggccgtgctggggcctgactgacccgccgtgattctccgcagaggatttcttggtccagtttaagggcatgtgctacttcaccaacgggacagagcgcgtgcgcggtgtggccagatacatctataaccgcgaggagtacgggcgcttcgacagcgacgttggggagttccaggcggtgaccgagctggggcggagcatcgaggactggaacaactataaggacttcttggagcaggagcgggccgcggtggacaaggtgtgcagacacaactacgaggcggagctgcgcacgaccttgcagcggcaaggtgagcgtcgtcgtccttccgcggggctcacccttggccggggcccgagtctcttgcgcacggaggggcgaggacggcgcggcctcaaggaccgagccctgacccatcccagggtacaggaaggtagcggggatttggaggctggggtagtatcggaggggcggggatctagggcagagcagggggatgcacaaaagcatcccttagttccctgcagggttgggttaggctgcccagtgtgtccccagcctccccgtccatcggccttgtcctctgctctgcatgttcttgccttgtgccttatgcgtttgcctcctcgtgccttaccttcgctaagcagttctttctgcccgaatgcccgccctcttcccctgcccgtccgccccactagcactgccccacccagcaaggcccacttgcacagctcgcgccgcaggaagcttcaggcttggcctggtggagttagggctgctccacaactgcgcgcagggcatccagcaattacagttgtgaaataagatattttaacttttggcttcaaattattattcatcgtaattctgttttcttaaacggctctcattcatggcggagctctttgaggtgagagtgttttaatcattgcatgcctagtacctgactcgtggaccggcatgtggtatgagctcaatgatcttctgttaaattaatgaataaatgtactcagctgcccatccacttaggctcaagggaaagcagaggataaatagagccttaaagatggactttatcaattattttctattattttgcttaatgctgtaaactcttattgacttggatcttagtaaggtttgtgaatgcagtctggggaaaaaggtgtttgctgaaaataaaaacaacgcttgaatggtgttataaggcagttttaatttcttagaaaagctgaacaaatggcacaatgaaaagagcagaagctttggaatacatagattgaagccactaaattattgaataaaaatagtttcaggttgcttttggagtagattttctccctccccccatcactatccacttcgggcataaacattctgaacgtcaattttacccacttagtgagcacttatttctagacaattgccttagcaaacaccatctaagttatgtcatttaatagcacagttacctgtgcattagagattagcattgccactttatatatcgtaatattggtacatgataaacactttaagtaatcaacccacagttatgcactaggacctgaagcctcccccaaatacacagcattcttttatgttcttcaatactcgtctacacagcctaagggaagtaaagccttgttaaagccaattttgacaagaagcagcaatgggtctattcctgcctgttttcactgttaatgggacaaaatgatactttcaaggcattgaaaattcactgattaatcaatccctagtctgaccccagtgttatctatgcaggttcacaaaacttccttgccttcttctgacccacatcctaatgctgtcaattatttatatttttgccatttcaagtctatttctataaaagttattctatcatttttctcatgaatttgtgccctctatttttactttcagtcttttaagatgaacaaatcttgtaagtccccacatagctgactgttatttcagtcagactccaggaaggagggcctaaagaaaagttcaagtccaagcagaaaccaagattccttccagacaatggctcatgagtgccatttaattggggtgctacctgctgacctcagcaaatcccagctatatgtatatgtttgcattacaggcacattcacccaggccaacctctgcatggatctcagaatatttcctatggagaacgtacatgataatgtctgatttcagaacaagaaagtaattctcaatagcaaggggatggagtagggtaggcagctagtaattacactatcttgagggttaaaaggaaattaagaaaaagcaggaaaatgagagaacatattaccaagtaaataaagcatacattaaatatttactataattttacactaaagaaataaaggaaatgcagtaaaatggccagagaggtaaaggttaagatgtataaaatatgcagggaaaggtgtgtcatttttgaccatgagcagcgctctgagaagataaaggaattgagttatgggcaaacatgatgtttgatcagtgttagtttttttcaaggcctgcctacttttccttcaaatattacaaacttttgaaataacattcaattttttggtctctgttactagattgcaagttctataaaggcaggaaccagggtttgttgtttatttttggattctcagtgattgtcaaatttatatttgttgaaggaaccttaatccaagacttggactccaggtatctttctattctggttccaaggagggaccttcctcacagcaggcgtgctgtgtggtctcacatctcactcctatatctttccctgtctgttactgccctcagtggagcccacagtgaccatctccccatccaggacagaggccctcaaccaccacaacctgctggtctgctcagtgacagatttctatccagcccagatcaaagtccggtggtttcggaatgaccaggaggagacagccggtgttgtgtccacctccctcattaggaatggtgactggaccttccagattctggtgatgctggaaataactccccagcgtggagacatctacacctgccaagtggagcaccccagcctccagagccccatcaccgtggagtggcgtaaggggaaactggtttccttttactgtgggccccacaagacaaagggcagagctcccgctgatccttcccatcccatctcttgtccctgacatcactactgagctgggaatcacaggagactagagcacctgttgcccatggcaagcacatcagatgaatcctgatctctttgtctttccagatactagggagatcactttccacatttgtgttagtccattcttgtactgctacaaagaaatctctgagactgagtaatttataaagaaaagaggtttaattggctcttctcactccactataaagaaatacctgagaatgggtaatttataaagagaagaggtttaattggcttatgattctgaggctgtaggggaagcatagtggcttctgcttatggggagacatatggaagctcctaatcatggcagaaggaaaagagggagtgaggtgtctcacagggcaggggcaggagcatgagagagagggggttggtgctacgcagttttacataaccagatctatgagaactcactattgtaatgacagtactaagggagatggtgacaagaatctggtctaatgatccagtcacctcccaccaggctctacctccaacattgttaattacaattgaacatgaaatttgggtggggccacagaatcaaaccatatcaacactactaaagccccagaaccagctctgacagctatgagagactgacttagggctggtgactggggccttagggtttaaggttatggatgaagtcctgaggggcaggggtgtgcttcttcctctccctcacccacctattgtgtccaagacctactggctggtctttctcttccctagggtggtcagactggagaactagtgtcccctgacatctccacctcctgtaccaaggacattatggggtgtggggacaaacactcacactcagttctgctccttaggggctcagtctgaatctgcccagagcaagatgctgagtggcattggaggcttcgtgctggggctgatcttcctcgggctgggccttatcatccgtcacaggggtcagaaaggtgaggaaccccaagggaaaatggggaagatgagctgtgacccagaccctctattcagagaggttctgtctctagatgtagctctttcctccttaccctgagaggaagtgcgaggagacaggacaagattggaggaggcattggaatctgattttactgggtgaatggtagcgctgccagagctgactgatagagcttattccagggcgtccttaccgttcatcatcgtctcactggctcctttctaaaagcttcctccattatgagggtcagagcctcggcctccttgtcttctagtgacaatttcctttgttttgggggattttaacttagggtgcttaaggacttaaagaacatgggagggaagaggatataaccccaattaaactacatgtgtcattttcctttggggtaagatagtggttgtttgtttaacaagacctttctctgtataacttccttttgtaggacctcgagggcctccaccagcaggtaatatttcagccatgatccagtcaggggagagggcacaggcataagagggaagagccatggtgaaaccgcatctctactaaaaatacaaaaattagctggacgtggtggtgtgcatctgtaatcccggctacttgggaggttgaggcaagagaatcacttgaacccaggaggcagaggttgcagtgagccaagatgggccactgcactccagtctgggcgatagagctagagttgtctcaaaaaaaaaaaagaagagcatgagcgtagtgttccagggcacagtggtctctgttcatggcctgtttgctgctatgagggttaagacttaggggaaaagtttgccagtttctacgaatctccagagattgtttcctagaaccaggccttaactttggtggcatctttttgtgaaatgtggggacagagccacatcttgaatgtgagatagtagggtgatgcccactttgtgccacattttgttagctactgcctgtaggcattttcagtgactaaaagaggctgctagtggtggagatgaagtgtcacccaatttactaaaaaaatcaaactcttcatattacccagaagggtaactgctgttcccccacctccacatatctgcatcaagctgaagttctgtgtcctcatgagctgattttacctttacacagatattggggaacgtgatgatgatatgccctagacctcagcatcctctgtttgatgctacagagggaactgaggactaggggagagggtgtgtcctcagggtaccctgtgctgatcatgcctcgtctctcttctccaggactcctgcactgactcctgaggacttttgtctgggattggtcatcactcttctgtaatgcccacctgcccctgcccagaattcctagctgcctgtgtcaccctgtcccactgaggtcagagtcctacagtggctcatgcagccacaggtcaccttctgtgatccccatcccaaggcactggtggtgactctgcttcctgcactgacccagagcctctgcctgtgcactgcaagctgtgtctactcaggccccaaggggactctctgtttccattctccccccacagacctgtcaagagaagcatgacaaacaaaatcatttaccgactttagtgcttttttccataattaaaccgat

SEQ ID NO: 339 - DNA, 1923 bp, Homo sapiens
gctgagcatcgccagggcgggcggcagggcgcggcctctccgccgggtgtacctcctgtcgcggcgcgagacctctggtgaaagaaaagatgttgtcccggttaagagtagtttccaccacttgtactttggcatgtcgacatttgcacataaaagaaaaaggcaagccacttatgctgaacccaagaacaaacaagggaatggcatttactttacaagaacgacaaatgcttggtcttcaaggacttctacctcccaaaatagagacacaagatattcaagccttacgatttcatagaaacttgaagaaaatgactagccctttggaaaaatatatctacataatgggaatacaagaaagaaatgagaaattgttttatagaatactgcaagatgacattgagagtttaatgccaattgtatatacaccgacggttggtcttgcctgctcccagtatggacacatctttagaagacctaagggattatttatttcgatctcagacagaggtcatgttagatcaattgtggataactggccagaaaatcatgttaaggctgttgtagtgactgatggagagagaattctgggtcttggagatctgggtgtctatggaatgggaattccagtaggaaaactttgtttgtatacagcttgtgcaggaatacggcctgatagatgcctgccagtgtgtattgatgtgggaactgataatatcgcactcttaaaagacccattttacatgggcttgtaccagaaacgagatcgcacacaacagtatgatgacctgattgatgagtttatgaaagctattactgacagatatggccggaacacactcattcagttcgaagactttggaaatcataatgcattcaggttcttgagaaagtaccgagaaaaatattgtactttcaatgatgatattcaagggacagctgcagtagctctagcaggtcttcttgcagcacaaaaagttattagtaaaccaatctccgaacacaaaatcttattccttggagcaggagaggctgctcttggaattgcaaatcttatagttatgtctatggtagaaaatggcctgtcagaacaagaggcacaaaagaaaatctggatgtttgacaagtatggtttattagttaagggacggaaagcaaaaatagatagttatcaggaaccatttactcactcagccccagagagcatacctgatacttttgaagatgcagtgaatatactgaagccttcaactattattggagttgcaggtgctggccgtcttttcactcctgatgtaatcagagccatggcctctatcaatgaaaggcctgtaatatttgcattaagtaatcctacagcacaggcagagtgcacggctgaagaagcatatacacttacagagggcaggtgtttgtttgccagtggcagtccatttgggccagtgaaacttacagatgggcgagtctttacaccaggtcaaggaaacaatgtttatatttttccaggtgtggctttagctgttattctctgtaacacccggcatattagtgacagtgttttcctagaagctgcaaaggccctgacaagccaattgacagatgaagagctagcccaagggagactttacccaccgcttgctaatattcaggaagtttctattaacattgctattaaagttacagaatacctatatgctaataaaatggctttccgatacccagaacctgaagacaaggccaaatatgttaaagaaagaacatggcggagtgaatatgattccctgctgccagatgtgtatgaatggccagaatctgcatcaagccctcctgtgataacagaatagaagcactcccctgataaatactttctgtgctccagggaaccccttttttcagacaagaagagataatgtcttcagtttt

SEQ ID NO: 340 - DNA, 1685 bp, Homo sapiens
gagtagctgctttcggtccgccggacacaccggacagatagacgtgcggacggcccaccaccccagcccgccaactagtcagcctgcgcctggcgcctcccctctccaggtccatccgccatgtggcccctgtggcgcctcgtgtctctgctggccctgagccaggccctgccctttgagcagagaggcttctgggacttcaccctggacgatgggccattcatgatgaacgatgaggaagcttcgggcgctgacacctcaggcgtcctggacccggactctgtcacacccacctacagcgccatgtgtcctttcggctgccactgccacctgcgggtggttcagtgctccgacctgggtctgaagtctgtgcccaaagagatctcccctgacaccacgctgctggacctgcagaacaacgacatctccgagctccgcaaggatgacttcaagggtctccagcacctctacgccctcgtcctggtgaacaacaagatctccaagatccatgagaaggccttcagcccactgcggaagctgcagaagctctacatctccaagaaccacctggtggagatcccgcccaacctacccagctccctggtggagctccgcatccacgacaaccgcatccgcaaggtgcccaagggagtgttcagcgggctccggaacatgaactgcatcgagatgggcgggaacccactggagaacagtggctttgaacctggagccttcgatggcctgaagctcaactacctgcgcatctcagaggccaagctgactggcatccccaaagacctccctgagaccctgaatgaactccacctagaccacaacaaaatccaggccatcgaactggaggacctgcttcgctactccaagctgtacaggctgggcctaggccacaaccagatcaggatgatcgagaacgggagcctgagcttcctgcccaccctccgggagctccacttggacaacaacaagttggccagggtgccctcagggctcccagacctcaagctcctccaggtggtctatctgcactccaacaacatcaccaaagtgggtgtcaacgacttctgtcccatgggcttcggggtgaagcgggcctactacaacggcatcagcctcttcaacaaccccgtgccctactgggaggtgcagccggccactttccgctgcgtcactgaccgcctggccatccagtttggcaactacaaaaagtagaggcagctgcagccaccgcggggcctcagtgggggtctctggggaacacagccagacatcctgatggggaggcagagccaggaagctaagccagggcccagctgcgtccaacccagccccccacctcaggtccctgaccccagctcgatgccccatcaccgcctctccctggctcccaagggtgcaggtgggcgcaaggcccggcccccatcacatgttcccttggcctcagagctgcccctgctctcccaccacagccacccagaggcaccccatgaagcttttttctcgttcactcccaaacccaagtgtccaaagctccagtcctaggagaacagtccctgggtcagcagccaggaggcggtccataagaatggggacagtgggctctgccagggctgccgcacctgtccagaacaacatgttctgttcctcctcctcatgcatttccagccttg

SEQ ID NO: 341 - DNA, 6203 bp, Homo sapiens
aattgttctacactgaaagagctcatgttcgaacactgaaggttcttgatcaagtgttctatcagcgagtatccagagaaggaattctgtcaccctcagagctacggaaaattttttcaaacttggaagatattcttcaacttcatattggattgaatgaacaaatgaaggctgttcgaaagagaaatgagacctctgttatcgatcagattggggaagatttgctgacatggttcagcggaccaggagaggagaaattgaaacatgctgctgctaccttttgcagtaaccaacctttcgccctggaaatgatcaaatctcgtcagaaaaaggattctcgatttcagacttttgtgcaagatgctgaaagtaatccactgtgtcgtcgtcttcaactgaaggatattattcccactcaaatgcaaaggcttactaagtacccacttctgttggataatattgccaaatacacagaatggccaacagaaagggagaaggtgaagaaagctgcagatcactgtcgtcagatcttaaattttgtaaatcaggctgtcaaggaggcagaaaacaagcagcgcctagaagattatcagcgtcgccttgatacctccagcctgaagttgtcagagtacccaaatgttgaagagctcaggaatttggatttaacaaaaaggaagatgattcatgaagggccattggtttggaaggtgaatagagataaaactattgatttatacacgttgctgctggaagacattcttgtattgttacaaaagcaggatgatagactggttttaaggtgtcatagtaagattctggcatctacagctgatagcaaacacacgtttagccctgtcattaagttgagtacagtgttggttcgacaagtggcaacagataacaaagctttattcgtcatttccatgtcagacaatggcgctcagatttatgaactggtggcacagacagtttctgaaaagactgtctggcaggacctaatctgtcggatggctgcatcagtgaaggagcaatccacaaagccaattccattaccacagtcaacacctggcgaaggagataatgatgaagaagatccttcaaaattaaaagaggagcagcatggcatttcagtcactggtttgcagagtccagacagagatttgggattagaatctaccttaatatcgtcaaaacctcagtctcattcactgagtacctctgggaaatcagaggtacgtgatctgtttgtggctgagagacagtttgcaaaggaacaacatacagatgggacactaaaggaagttggagaagattatcaaatcgcaatcccagattcacacctgcctgtctcagaagaacggtgggcattggatgcactaagaaatttgggtttgttgaagcagttgctggtgcaacagctaggtttgactgagaagagcgttcaggaagactggcaacatttcccaagatacagaacagcctctcaggggccgcagacagacagtgtcatccagaactctgaaaatattaaggcctatcattctggtgaaggacatatgccctttagaactggaactggtgacattgcaacttgttacagtccacggacttcaactgaatcttttgctccacgggattcagtgggactggcaccccaggatagccaggcaagtaacattttagtaatggaccacatgattatgaccccagagatgcctaccatggagccagaagggggtcttgatgacagtggagagcacttttttgatgcccgtgaagcacatagtgatgagaatccatcagaaggtgatggagcagttaacaaggaagagaaggatgttaatttacgcatctcaggaaactatttgatccttgatggctatgacccagtgcaggagagttccacagatgaggaggttgcttcctcacttaccctgcagcccatgacaggcatccctgctgtggaatccacccaccagcagcaacattctcctcagaatactcactccgatggggcaatttcaccattcacccccgaatttctggtccagcagcgctggggagctatggagtattcctgttttgagatccagagtccctcctcttgtgcagattcacagagccagatcatggagtacattcataagatagaggctgaccttgaacacttaaagaaggtggaggaaagttacaccattctttgccaaaggctggctggatcagccctcacagacaagcactcagataaaagttagagccgcatgtcctggaggtgactgcaggttgttggatttggagtatcggccgtgtctcaccacatcctggctccagtgtggatgcagagagagtgtgacagaggatctgcctgtgaaccacctgggattagtcaagtcccaaggtgcccagagtgggactagttcttcacagtgtggcagctgcactaatctgtttgtgagggaatatccattccctcactctactctcctcactatcggaaattcattttgattcagaataaaaaccaaatgtatagagctttgggtgtaggatatgaaattgtacttagatttaagaaaaagagaaaatcagatgtatttatttgacttcattccgtatttgaaagcacattttaatttttatttgccttgttttgttttaattgagtagtgagagttttagacctttgtctttagtacacccaaggatcaactgctcctgaagcaaagaggtcaggatggagtatgcagaagttgggtagagaggttaagaagaggaggaagtgagacggggaagggaggagcaccttgcttcactatacagtattccaagctctctgctgtccagtaggctgcttctctgagggtcacctcaaaggtatgctatgccgtgtggctcttatgtgcccaggtggtgtggtcagagagtggatgggcttcctcccgccctgaggcaagcacctcttctctgtagctgggatcaaccacaattaataggaatcctcaacatactaaatagcaggcacttgaaaatgggtgtgttttcttccattgtcgtcttttctattgagggttgggatttgggtgggagaggaaagcaaattttattttcttgactataaatttgttattcttggtatcatttcatttttataattatacattagacattggcacttgtgtaaaactgtccctgcagattgagcaggaagtaaaaacaaatggaaatgcttcggatagtggcaggggtgggggttgctaaggaaagggtgggatgggagtgggtaaagagtttgggaaggttatctaactgaatcactactgagttgaatcatggctatcattagccacaggtactgctgattataaggccagtaaaattttagtacctggaggtttgactctaatttttgcactgatggtgccaaagggccctgagtcaaaaggatagccaagggtggagtggaaaaagatatggtgaaggcagaactgctcacaccagctccagaagcacgtcctctgacttcactgccgcagctctttccacacggggccgtgattgaccctaaaaattgcagaccagcacatacactggacactgcaggcaaggtgttggtaactgcctgctctaggatgaatagtagcgttagcagcaccctacagagggtaagtttcagaattgtaatttgagaactccttcaattatattgactttctttggttttccttgtgcattaggtatatattttttgaagtatttttgccaactaaaatgaagtctgtaaattctgttaataaacaaggagttcatccgttgctcacatctttcattggtgccctctgaactctgtgggttgctaggatgtaattttaatgcttccctgcagtccaaagatgatttttcaccacaaatggtaagggatgcccacctacttttataaacaccactgcaacttaacaagtttatttatctatgtccagatttctgtttctgtcctaaattgatctgtgtttttaggtggatcaacttggatctttagacctcatctataaattgaaattatatttttagtcataagccaagtacaatctaactcagaatgggattaaaaattttagaagcagaagctaatatataaatgaagtttgggatttggaactttctgtatctcttaggaggaacaagtaaaaaccaaatggttacattgtgctgctagaaataatgtcattctcaattaaaagggttacacctgtagccacttgacactaacaccatcgagggcaattaatcaggagaaaagtaaatataaaaactgctcttaacgtcacacactacagggtaattatgtaattctctagcactcaattaagaagcttgtaggttagcaaaatttcagtttctctagttcagccagtgtcttgtccttagtaattatttgctttccctgcagttcaatttctccttggaactctaacaggactaactggaaaaatactttgaccatagctctagtacttccaaataaattcatatctagattttcaaacaaagccccaagatgaagtctaattctgaaaatatctcacaatttttgaatgttctttttatcttaccgacctaacttctcttttccctcccaacttggcctcccacacgttccatttcattttggccattatagtcacatccgtttgactttggttgtgacatcttcctttcaggatgatggaattagatgcagtctgtctttgagtgagactggtcaccatcagaggagttttttctaagtgacgtgactagaagttgaaatctacttccctgctaaagggcacaggggtggtgtacaaagaaagctaccttcccagagcaagcaggctgcattttagctatggaagtgacctgctgtgacactgtgctctcttctgtgggcttaatggttcctttgctatgaagtggcaaattacatgtagagtgtctccttccttttcagagaacagttaatcaaggcaaatcagcaagcccccaaagtgctgtaatttaacatcatgattaccaccttcgaagctatatattttgcatactttaaaatcacctaacttggactgcttgaattacattggcttttagaaccgaaattgtaactatgtattgtatttcatgggaggtatattttatgagctttttggctttcttttttcccacagcaactgccaatgaaggatgaatcccctttttaaaaagttgttgttgttgttgtttatttgattttgagttaggagggataatagagaagtccatttaaaaattatttttagaagctaaagaaagtaattatgcttcctgtgaattgtcttttactggcatctttgttttcctctttgatgttagtaaatttggtgtaatacgtggggcttccatatttcaaagtggaagctttcttctctgaagtcgatatatggttttgaattactagagctttggtcagtatttccttccctatatgtcacagagggcaccactgagaactgcgtgcataggacctcaaaatacaaaattagcagggcctcacagtcagcttcctcatggctagtttttcccccttatattacaatttttgttttataagtcatttttttcctgatatttccaccacttttcagagtcatctacaaaatttttctttcctcaagaaaagagttccttttgccttattccttatgccttccccactggtattgagggttttgataataaattggtaggaaaaaaaagtacctcctagaaggaagccttccccaccatttccaggtgccaactgctaagcagatatattccaaaaatggtaactgtcatgtgcacactgttggttatttttaataagcctcttcctactagaacattttattttccttgttcaccatacaatcatgtactctttaacagaaattgcttttaaaaaatatctggaactatctttaaaaaaactttattaataatcatgtatttttactgatcacattttgaaatgcctaaaagactttattgttctaattatccagatgtacctttgtaaaatagctcttttatgaattagctgataaggctgtatgtttctggaacaaaatattggtcatctaaaaactttctgttttctggggtctgggaaaatagaaaataagatttcaaatattaaataagcttaaagg

SEQ ID NO: 342 - DNA, 5495 bp, Homo sapiens
cggcgctgctcccaggcatctccgaccctcggtgctgtggggagccccacacttgggctcctcgcctctcgccctcgctccccgtccctcctcccctctctccgccccttcccccttttctttctcctctctttcttcccctctctcccttctttcggccgccgtctcccccgcgccctcctcggggcggagggaagccgtgaagggggagggagggctcggtgtcaatttttttttgtgtggctgcggccgtagcctgtggcgggcaagcggggagaccccggcgcagcagaaccatggatggcccgacgcggggccatggactccgcaaaaagcggcggtcgcggtcgcagcgagaccgggagaggcgctcccggggcgggctgggggccggcgcggccggcggcggcggggctggccggacccgggcgctctcactcgcctcgtcgtcgggctccgacaaggaagacaatgggaagcccccgtcctccgccccgtcccggcccagacccccgcggaggaagcggagagagtccacctcggcagaagaggacatcattgatggatttgccatgaccagctttgtcacttttgaagcgctggagaaagatgtagcacttaagcctcaggaacgtgtggagaaacgccagacgcccctgaccaagaagaaacgagaagcacttaccaatggcttgtcctttcattcaaagaagagcagactcagccacccacaccactacagctcagatcgagaaaatgaccgcaatctctgccagcaccttgggaagagaaagaaaatgccgaaggcactcagacagctcaagtcaggacagaacagctgcagggacagtgacagtgaaagtgccagtggagaatccaagggcttccaccggagcagctctcgggaaaggctcagtgatagttcagctccttccagcttgggaacaggctacttctgtgacagtgacagtgaccaggaagagaaggcatcagatgccagctctgaaaaactcttcaacactgttattgtaaacaaagatccggagttaggtgttggcacgctaccagaacatgacagccaggatgcagggccgattgtccccaagatatcgggtctagagagaagccaggagaagagccaggactgttgcaaagagccaatctttgagcctgtggtgcttaaagacccctgccctcaggtcgcacagccaataccccagccgcagacggagccccaactccgagctccttctccggaccctgacttggtgcagcgcacagaggccccacctcaacccccacctctgagtacacagccaccacagggccctcctgaggcccagctccagcctgccccgcagcctcaggtgcagaggccacccaggccacagtcccccacccagctgctccatcagaacctcccacctgtgcaggcccacccctctgctcagagcctctcccagccattgtcagcctacaacagcagtagcttaagcctcaacagtttaagcagcagcagaagcagcactccagcgaagactcagcccgccccacctcacatctcccaccacccctctgcctccccgttccccctctccctgcccaaccacagccccctgcacagcttcacacccaccctccagccccccgcacactcacatcaccccaatatgtttgcccctcccactgctctgcctcctccaccaccactgacatcaggaagtctgcaggtggccggacacccggccgggagcacttactcagagcaagacatcttgcgacaggaactgaacactcgttttttggcctctcagagtgctgaccgcggggcttccctgggccctccgccctacctgcggaccgagttccatcagcaccagcaccagcaccagcacacccaccagcacacgcaccagcacaccttcacgccgttcccccacgccatcccacccaccgccatcatgccgacgccagcacctcccatgtttgacaaataccctacaaaagttgacccattctaccggcacagtctcttccattcctatcctcctgcagtgtcgggcatcccccctatgatcccacccactggcccttttggttcactacaaggagcatttcagccgaagttgacagatcctttcagacctatgttaaggaaaccagggaagtggtgtgctatgcatgttcacatcgcctggcagatttaccaccaccaacagaaagtcaagaaacagatgcagtcagacccacataagctggactttggactgaaacctgagttcctgagccgccctccaggccccagtctttttggagccatccaccacccccatgacctggcacggccttcaactttgttctctgccgctggtgctgcacacccaactgggaccccttttgggccacctcctcatcacagcaacttcctcaaccctgctgcccacctagagccttttaatcggccgtctacattcacaggcctagcagcagttggtggcaatgccttcgggggacttggaaatccttccgttacacccaactcaatgttcggccacaaggatggccccagtgtgcagaactttagcaaccctcacgaaccctggaaccggctgcaccgaacgcctccgtcgttcccgacccctccgccctggctgaagccaggggagctggagcgcagcgcgtccgctgcagctcatgacagagatagagatgtagataaacgagactcatctgttagtaaagatgacaaagaaagggaaagcgtcgagaagagacactccagccacccttcaccagcacctgtcctcccggtgaatgccctgggacatacccgcagctccactgaacagatccgggctcatctgaacactgaggctcgggagaaggacaaacccaaagagagggagagagaccactcggaatcccgcaaggacctggccgccgacgagcacaaggcgaaagagggccacctgcccgagaaggacgggcacggccacgaggggcgcgccgcgggcgaagaggccaagcagctggcccgggtgccgtctccctacgtgcggaccccggtggtggagagtgccaggcccaacagcacctcgagccgggaggccgagccgcgcaagggtgagccggcctacgagaaccccaagaagagctccgaggtcaaggtgaaggaggagcggaaggaagaccatgacctgcctccagaggccccgcagacccaccgggcctcggagccgccgcctcccaactcctcgtccagcgtgcacccggggcccctggcctcgatgcccatgacggtgggggtgacgggcattcaccccatgaacagcatcagcagcctggacaggactcgcatgatgacccccttcatgggcatcagccccctcccgggcggagagcgcttcccgtacccttctttccactgggaccccatccgggaccccttgagggatccttaccgagaacttgacattcaccggagagacccgctgggcagggacttcctgctaaggaacgacccgctccaccggctctcgactccccggctgtacgaagccgaccgctccttcagggaccgggagcctcacgactacagccaccaccaccaccaccaccaccacccgctgtctgtggaccctcggcgggagcacgagcggggaggccacctggacgagcgggagcgcttgcacatgctcagagaagactacgagcacacgcggctccactccgtgcaccccgcctccctcgacggacacctcccccaccccagcctcatcaccccgggactccccagcatgcactatccccgcatcagccccaccgcgggcaaccagaacggactcctcaacaagacccctccgacagcagcgctgagcgcacctcccccgctcatctccacgctggggggccgcccggtctctcccagaaggacgactcctctgtccgcagagataagggagaggcccccttcccacacgctgaaggatatcgaggcccgataagccgagaacaggagcaagaacgaggaagaagaaaccctaggcagacaccaggccaggcttgagagacagaactcctgcatggctcacacagactgggggggaaagccccaccccttccccttgtaaaaaatgtatagactcagtgcacattttgaaatgttttgtatattatatgttgagatttttcagatcttttagcccagtcatatgttctcacgtctcctactttttgtttctcgtataaaactttttgatttgaaccaaaacagtgaagatgacaacacacaccaattggatgataattgtagcgggggcggtgggggggagaagtccacgccatccatcatgcaaaattctttcagatgaggtgggaaggccgtgtacatagttatgtaaaaagagattgcttcatgagctaatggttcatatatgcaaaagggtaagatgaaagctttactttgtacaaatgtaaatagataaagtaacataatacattaatacttcttaaaatgtgctatttgcaaacttacttaatatcagtgaacacagtcggctaaagctgtgttcccatatattgttatagacagctaaacccttcaactatgcaatgaatgttcgggcttttcacaaaagcccgcctaactcaaaggagccttttcaaatccatttacagcatacttaaggtcatattttccctgaacaagcgcttacgtgatatgactctgttttccttgcttgttttttttcaaacggagaaacatcctgttttgcaaattggaccccaggctggaacttagcatctgaagttgccgcttgtgggctctgggggaaagtgtagccccggagaggtaactgaggacatgagcaaccagtgccagggagggtgggatttgccagatgccaaaatcaggggacgggtggtggtgtctgtcagacacacacaggtcgccagtgacttcacacacacctcatgtgagaaccatgccttttttagtgtgtcctatttcatacctgtacacacttcctcgttttgtaatgagatttacttacacccaaacagatcctgaaagaaagcttcaagttttctcagatgatggatatgttttcactgtattcaataactgacggatgtaaggtgcacgtttcctgatgtgacgcactgtattccagctggtgatcaagtctgggaacagccgtaacaggtcaaccttgtggagccatcgcgagttagagggtgaaagatggcagaaaaaaaagtcttgtgtgtgagtgtgttttttgagtttgcatcaatcttaatgtctcttcataatacttttataatacattaagcctcttgtctacatatttggagagaatatgactttactagcagagaaatacaatatatcttgtctactggactgtaaaatatatgtatgaaataaaattagttccatttggtcttctagtatattaaagtgctatctgacgttgttatcctgtttttgc

SEQ ID NO: 343 - DNA, 1030 bp, Homo sapiens
atgaccatggaaacagttgaatcccagcatgatggaagtataacagcttctttgacagagagcaagtctgctcatgtgcagactcagactgggcaaatttcaatccctgctttagctcagtgcagtgagctgagatcaggcaccagaagaggctccccagctgtaactctagtgcagttaccttcgggccaaactatacatgtccagggagtaattcagacaccacagccatgggttattcagtcatcagaaatacacaccgttcaggtagcagcaattgcagagacagatgaatctgcagaatcagaaggtgtaattgattctcataaacgtagagaaatcctttcacgaagaccctcttataggaaaatactgaatgaactgtcctctgatgtgcctggtgttcccaagattgaagaagagagatcagaggaagaaggaacaccacctagtattgctaccatggcagtaccaactagcatatatcagactagcacggggcaatacattgctatagcccaaggtggaacaatccagatttctaacccaggatctgatggtgttcagggactgcaggcattaacaatgacaaattcaggagctcctccaccaggtgctacaattgtacagtacgcagcacaatcagctgatggcacacagcagttctttgtcccaggcagccaggttgttgttcaagctgccactggtgacatgccaacttaccagatccgagctcctactgctgctttgccacagggagtggtgatggctgcatcgcccggaagtttgcacagtccccagcagctggcagaagaagcaacacgcaaacgagagctgaggctaatgaaaaacagggaagctgccaaagaatgtcgacgtcgaaagaaagaatatgtaaaatgcctggagagccgagttgcagtgctggaagtccagaacaagaagcttatagaggaacttgaaaccttgaaagacatttgttctcccaaaactgattactagaaatatttaactatgaactgattacaga

SEQ ID NO: 344 - DNA, 2586 bp, Homo sapiens
ctgcagtaagccaagatctggccactgcactccagcctgtgcaacagagtaagactccatctccaaaaaaaaaaaagaaaaaagaaaaaaaacacaatgagataccactttacagccactagatggctagaatcaaaagaatggacaatagtaagttttgttgacaatgtggaaccctcacgcattgttgatgggaacaaaatggtgtagtcactttggaaaacagtttgatagttcgtcaaaatgttaaatatataattaccatatgactcaacaatttcgacttctaggtatatacccgaagagaaataaagcatatgtccacacaaacacttgcacataaatatttatagcagcatcattcataatagctaaaagggaaaacagcccaaacatccaactgatgacagacaaacaaaatgtggcatatccatacaatggaatgttattcagccataaaaaggaatggggaatggatccataccaccacataggtaaccttgaaaacactaactgaaagaagccagatgtgaaggtcacatattgatacttctatttatgtgaaatgttcagaataggaaaatctatagagccagaaagtagatttgtggttgccaggggctttcgatgacaggaggggaggggagcagtcattgctagtgattacagggttcttgagagggagtgagaaaaaatgttctaaaatgtattgtggtgatggttgcataactctgtgaacatacaaaaaccattgaattctatactttaaaaaggtaaattttatgggatgtggattatagctcaataaagctgtcattaagaaaggaaaaggaagggaggggagaagagggaaaggggagggaggggaggggaggggaaggggggagaaaaaagatacattgtggcatatctcttcccttttacctgtcattatgtgtcagtgcctcccattggcctaaactacccagaagccagagggaaagccatttgggactatattccactgtgacactgagcagagcaagggaaggatggggacacttctctcacacatctctgactccccaacatctaacccatggcctggcatgtgatattcatgctataaatatttgttgaatcagtaaatggcccctcatctagattctgccaggcagcgcagggggctttttgaatgtaaatgacctaatgattcaggatcctatgaccagcgactgtcaccctctgtcacctttcttctgccctttatctctgaaggcattgaaggggccctgcatgagtcagggagggctggggggaggagcaagggtgggaggggcagggaagagggtggcttctccgacaacttaaaaggggcttgaaccacttcctccccagacaggggtagtgcgaggccgggcacagccttcctgtgtggttttaccgcccagagagcgtcatggacctgggtgagtgagcctcttcatgtgagaaggaacagtaccagggtcttggacacccagactgaccctgtggaatgggggtggaggatgcgggtggagcgcataggggtgcttcctggagaaatcagttctgatttggtgggcattggaagctacttccagagaatgccccctgctgtcccaggaggggtgcacctgccctttcagacctggagaaaggggtcagcctttggtgccagtggggacaagggaggggccgagatcatgtctttctaaaacagcagggacataagagagtggcggggctgggcttggtggtctggcagaacctgttctcatcatgagggtgataggttaggccctctggacctctggggacaggtttcaacagagaaattctccctagagagcttaggaccttttacccactctctgattcccacctttctcccctgccaaatattcatatacctgtccacttggggtcatgaggagatgcaaatgaaacgtgactgggttgtgagaatggtgcggtgcattgcaaatgcaagctctggttgctttctctctgctgcacatcccacctgctttgatctggctttgctgttgcctcttgcaagttaaggaacgggcaggcaacatggaatgggatggcaaggggcactcagcttggagaaatcatagccaggccttcagcacagcccctgcccctgagcaaacctcacgcactctgccccggcagataactctactctttagaaagccctttctcaggtctaacctagaaggggtcaaggggaagcactgagggtgttctgagtggttcatccagctccagacgccccctttataaatctcagctgtggagtcagaccaggctgaggctaagaagaccaggttctagatggcttgtctcaccagcaaacaatgcaccaacggcggcctcaaagccacgaagggttggctttaaaaagtgaaggttccctggtgctgtcctcacacccctcctcgccacaccacagcctccttgatttcatctcttagtttcccgcctgccctgaacgctggatctggacccagcaaacagctgtgaaagggttaaagtggtcaccccacccactgactgtgaactcctgaaagcagg

SEQ ID NO: 345 - DNA, 128978 bp, Homo sapiens
gatcctacttcgcactcacaaatatggccataataaaaaaggaaaaaaatcaacaacatccttgttggcaaggatgtggaaaaattagaatcctcatacattgctggtgggatgtaaactggtacagccaccagtacctgactacagccataccaccacgaacatgtccaatcttgtctaaactttgatgtggaaaaactgatacggaaagtagtttgatcagccgggcacagtggctcacgtctgcaatctcagaactttggggagctgaggggggtggatcacctgaggttgggagatgaagaccagcctggccaacatggcaaaacctgtctctactaaaaatacaaatttttgtatttttagtagagccgggtgtggtggctcacacctgtaatcgcagctgctcgtgaggctgaggcaggagagtcatttgaacccaggaggcggagattgcagtgaaccaagatcacatcactgcactccagcctgggtgacagagcgagactccatctcaaaaaaaaaaaaaaaaagaaaaagaaaagaaaatagtttgatggttcctcgaaaagttaaacacagaataaccagcaatgccactcctaggtatatactcaaaagaaatgaaaacaggtatcaaacaaaaacctgtacatgaatattcatagtagcattattcataatagccaaaaggtggaaacaactcaaatgtccaccaactgatgactagataaacaaaatatggtacatccatacacaggaatattattcagccataaaaagaaatgctgatacatgctacaacttagatgaaccttcaaaacatcatgcttagtagaagaagccagacacaaaaggttgcatatagtatgattccatttacataaaatgtctggaataggcatatccatagaaatacaaagagatcagtatttacttggaacacttgggacaataacaaataaaataataaaaattttaaaaaagagtccaggcgcagtggctcacgcctgtaatcccagcactttgggaggccaaggtgggtggatcataaggtcaggagatcgagaccgtggtgaaaccccgtctctactaaaaatacaaaaaattagccgggcacgctggcgggcgcctgtagtcccagctactcgggaggctgaggcaggagaatggcgtgaacctgggaggcggagcttgcagtgagccgagatcatgccactgcactccagcctggctgacagagcgagactccgtctcaaaataataataacaataataataataataataataataattattattattattatttaaaaaagaaggagatcagaggttgccagagggtgaggagaaaggaaaatgaagagtggctgccaacaggtactaggtttctcccatctgagtactaaccagactcaaccctgcttagcttctgagatcagacaagattgcacatgttcagggtggtatggctgtagacaggtaccagcgtttctttttggggtgatgaagtgttctggaattagatagcggtgatggttacacaaccttgtgaatatacagacatgagccacataatgatgtttcagtcaacagaccgcatatatgacagtggtcctataacacagtggtccccaacctttttggcaccagggactggtttcatggaagacaatttttccatggactgggggtgatggggggatggtttcaggatgaaactgttccacctcagatcatcaggcattagttagattcttggaaggagtgcgcaacctagatccctagcatgtgcagttcacaatagggttcacactcctattagaatctaatgtcaccactgatctgacaagaggcagagctcagatggtaatgtttgctcacctgctgctcacctcctgctgtgctactgggttcctaactggccacagccctggggtttggggatccccgctataagattataataccatatttttactgtaccttttctatgtttagatacactaatacttatcattgtgttaaagttgcctatagtatttagtacagttagatgctgtacaggtttgtagcctgagatcagtaggttacaccatatagcctagatatgtagtaggctgtcccgtctaggtttgtgtaattatactctatgatgtttgcatgacgcatttctcagaacctatccttgttgttaagtgacgcacaggtactaacaactactgaactgtatgctgtaaaatgatgaatttcatgatatgtgaattgtatctcaatagaaaagagcatttataaagtttttgttgctaaatttatttactttcggtaaattttcttttaaaagatgtctatgttttactgtcttcgtggtgctgggacataactgacatctgaagccttgaatgcctctctttgcaaactcatttgttactactcagttaccatctcacctccaatacccaactgcataccaaacctctagccattactagaacacatactctgagctctgccatactttagcgcctgcacacatgctgtttcttctgctcagaaacttttgtgccttctgtccatcccatccaagcctgtttttcaatgcccaacacaaatgtcactggtaccctgaaacttcaactcctccttgccccatctcagaaaatgtaactttctgtattcttctctctgtatattcctctaaagtggtatttcttatactataccataatgacctggtcccatatttgtcctcttcttccctcttcatcccagactgggaccacaaggaggtagaactttttctgtttttttttttttttgagacagagtcttgctctgtcgccaggctggagtgcaatggcacgatctcggctcactgcaacctctgcctcccgggttcaagtgattctcctacctcagcctccccagtagctgggatttcaggcgcacatcaccatgcccagctaatttttgtatttttagtagagacgggatttcaccatgttgaccgggatggtctcgatctcttgtcctcgtgatccgcccgtctcagcctcccaaagtgttgggattacggccatgagccactgcgcccggccggaggtacaactttcttagtcaatcttgagcaccagtgtagtgcttagaatcgggtagtgagagaagctaacatttactgaatgcctaagaagtccagggcacataacagtcttcacaaccatcctgtgaagtacgtattaccctatccattttacagataaagaaacttgagtttcaagaaaggtatacctaaggtcattcaacttgttaaatgatggaatggaggagttgagaccagattggacttctgcctcttttttttttttttttttttttgagacaggctggagtgcagtggtgtgatctcagctcactgcaagctctgcctcccaggttcacgccattctcctgcctcagcctcccaagtagctgggactacaggcgcctgccaccacgcccggctaattttttctacttttagtagagacggggtttcaccgtgttagccaggatggtctcaatctcctgacctcgtgatctgcccacctcggcctcccaaagtgctgggattacaggcgtgagcgaccgcgcccagccgaacttctgcctcttaaatccagggttctccctgtcagtacagtgaggtggtaactagcaaaagctatgagatatgactgcctgggtacatatcccagctctttcacttatctttgtggctttacgcaaattacttaacctctttatgattgtttcttcatttgtaaaaggaagataataacagtgcctatatatagggtttttatgaagaataaatgagatagtatatataaagcacttagaacagtatctggcacatactaggtgctcaataaatgttagcgatgacatttattactgtcccacattgagctggtgtttgttaaacactggatgactggataaaatgtacatctttcatgcagagattgctcgattatccatttcactgattcaggatcagagtctcttaagaatccagagaggggatgttgaagccctaagaagtaaaaacactaaaatgataacattttgaccttttgaaaactctttgaagtggcaatggccacaaaattgagcggaaaccaaacatattcagccccatttccagataaattggatttgctaaaccactcagaataacaagagcaagaattagatgttcagctaagctctagcttctgatcctagatggtggcaataacaacgatagtattaatgataatagcagaaactcttaatatgtgtgaggcattcttctaaatgctttacatatattaatttaatgttcatcggagcagattctcctactgtatccaagagatcagaaattcagagcaaaaagcagattgctgcctgatagcagatccactctaggaatggggagattttctcataaatctaatgactggtgaaagtgacaagaggttagtccactcagtgttggaaaggacaagatcctagaaagtggaaatgctccactattgctttagggggaacagcctggctacaactgggcagactttctattactaacatcaggataatagggaagctcctgccaatgctgcatagaactaagaacacttagcagtgatggctgacttccaactgagccattaaggtaagtgtagaagaaagctccaggtagaaatatctttgggaactcagagaacacactgagtgtttgaagctggtacttaatctattattgaactcagagtttgccattctggggccaatttgagtccacttatgacacctcccacagcactgctcatttctgttaactgggcttcacagagggtgagaagggcagcaatcagatcatataattgggcctcattgtaataaaatgttgatttctgttgtccttggacttccttccagccacaatcactctatgatcttgtctgagattctttttcctttctctctccattttgctgactgtaatggaataatagcagaagctctcaatctgtatgaggaatatatatgaagaatgtgtaacattcactgtgtttcctaatagatgaattatctaaaggacacctcttaagaagagatgagatggagccaactgtcagaaaaaaaaatgggtgaagaaagtttcaaggagaagactccacagagcagaatgggaaagatggccaggagaaaagtgagataataaaaggaaaagcagtccctgacacagaaggtactcaacagctatttgctgactgaaagaataaacactaataagagaatgaaataccaggattataaagagggaacaaagatattttcccatctactttgttgttaccccacccaggatatatttaggttggtgcaaaagtaattgcggtttttgaatcgttaatagattaacatctaatttatgtattgtttacatacatacaaatacaaactacaaccatatatgatacatttaaagtaatacgctaggcacagtggtgcatatctatagtcccagctgaggtgggaagactgcttgagcataggagttcaagtccccttgggcaacatagcaagaccctgtctctaaacaaagaaaacaaaaaaagtgaagtaattaatgccaaacattgcaatcagggtttggtgcacttgaaatacacaaatgagtgtttttacatgctgaagacacagcaaccaacaactggggctaaagtgctgcattcctaaagttaacccacagagcctatcatgccatgccaaagttcactgctccggctccaaaccggggactttcctttcctatttcctctccctaacagcttagagctactggactccatccttgaactcctctgtttactaaaaatgttctttataagctatgaaatctggatttgaggtctggtttcttacttcaactttgcaactcatttcccaccccgagttcacacaatctcaaaatgttcatgaattttatggctagacctaaagcttctttgtgccttcctgccagcctgcctttgttttggtaccttctagcctatcctcactcacttgagtttttactctaattttctgtccagtcttcccaccactagtcccctatcaaattgcttgctggacatttctatatacatagcttgcttgtccttacgtcaaattcaaaactaccaagagcaaatccaatgtgtgttcccacatcagctcccctttctcacctccctggtatggttactgaccaattagaatgaatgtccaaccactcagaatgccacaggcaataggccaaatcagtgtactgggtccaatgtcagccctgtccataatccttctacccagctaaacttggaggaattgtctgttctcacagtctcccttcttcatctcttattccttccataatccatacatttttagccctccttccttatcataaaaattcctcctgacaaggtcaccaatggccttcttgttgctaaaaccaattaattctttttagcttttatttcacttgatcatccttggtaacatttaacaatgctgaccattccctcctccctgaaacactctccttagcttctctgacattatactcttctggttgcaatccagtcacctctggtggtgccttctcagcctcccccaaacctgcttttcctcaggtttcttatctcagtgaaagtcaccaccatcccctaagctcctaaaccagaaaccgaattccttattcttcttatttgcttctaaccttccttcagtcatggaatcctgcttattcttagtttgcttctcttcactgcctacattttttttttttttttttgagatggagtctcgctctgtcgcccaggctggagtgcagtggcatgatctcagctcacggcaacctccgcctccctggttcaagtgattcgtctgtctcagcctcccgagtagctgggactacaggcacgtgccaccaggcccggctaatttttgtatttttagtagagacagggtttcaccatattggccaggctggtctcaaactcctgacctcgtgatccgcccgcctcggcctcccaaagtgctgggattacagacgtgagccactgtgaccagccttcactgcctacatttttaaagcacttaaatatgtgctaggcaggtgtgttctaagtgatttatcctcacaataagcccataaggtaaattttattatctccaattttcagattaggtaacagaggcaaagagtggttaaataacttgcataaagtcacataactactaagtggcagagcaggattcaaacccaggtggcctgactcaattctggatccaggtcactatcctatctcactgaaatctctgcaacagcctccttggtttccagccttccatcatggatggcttccctgtagccacagtgatctttgttaaaacagaagtctgactcttgctactcttttgcatgaaaatctttactggctctttattgccttcagaataaagtctacactcaatatgacattcagggacctccataacctagccagaaagtgtatacttctttggcttcatgtttttggtttttggccccattttaaccacgaccctaaaagctccactagcacaatgatagcctatacttccaggtttctgcactgtttgatgtgccaagaacactctttcccaccttcacattcgacgacttctgataagccttttctgatttcctaagaccagggtatatgcctctcctgtgagctcccacagctcccagttctaattctcactgtagcatttatttcactgtgttatatgattctactacccatctactaatattaatatctgctttatcacaagattgtgagcttcctgagaatgggaactgtgtaggattcactgttgtatcctcagtactcactgctgcctacctggtgcacggtaggcaatattcatttaatgaataaaactttattgtctatatcacactctttaacacttacttatataatgccctatattgattttattttcatatgtgttagcctgatctttataaccagaatgtcagtttcttgaaagatagcaattatacccagtacttcttttataaatttatttactcttaggctgggtgcagtggctcacgcctataatcgccaaattttgggaggctgaggcaggaggatcacttgagtcgaggagtttgaggtcagcctgggtatagtgagacctcatctctataaaaaataagcaagattagctgggcatggtggcatgcacctgtggtcccagctattcaggagagctgaggtgggacggcttgagctccagagcctgaggctacagtaagccatgatcatgccactccagcctcggtgacaaagcgagatcctgtctcataaaagaaaaaaaaattatctttagagatggggtctcactctgtcccccaggatggagtgcagtgtcatgatcatagctcactgcagccttgaactcttgggctcaagagatcctcccacctcagcctcccaagtagcggggactacaggtctgtgctgccatgcccagctgattcttttatttgcagagatgggggtctcactatgttgcccaggctggtcttgaacttctgacctcaagcaatactcctgcctcagcctcccaaaatgttggaattataggcaaaacccaccatgcctggcctatacctagtacttacaagttaggaggtactcacaaaaattcctgataacagctaacatttattcagggatcaatgaatgtcaacaatccaatgattttggtaatttttctctctctctctgcctccctccatatgaggaaactgagccatagtttagtagcttgcctaagatgacatagctaggaagcaacagagctgggatttgaatcctcatgttggtgcctgcattcttaaccactatgataacaggctaagaaagcttaaaattatagatgctaagtaacttacctaagatctttttaaacatttaaaaagttttttttttcctttgttagtaggcaaggaactaagatcatagtgcagtgctaagactagaacccaagtattttcaaaggctacgctcggctgggcgtggtggctcatgcctataataccagcactttgggaggctgaggtgggtggatcacgaggtcaggagtttgagatcagcctggccaacatggtgaaaccccatctctactaaaaatacaaaaaatagctgggcgtggtggcgggtgcctgtaatcccagttattcgggaggctgaggcaagagaatctcgcttgaacctgggaggcggaggttgcagtgagccaagatcgcaccactgcactccagtctgggcgacagagcgagactctgtctcaaaaacaaaaacaaaaacaaaaaaaaaccccaaagcctacgctcataaattatttggtatactgcttctcctactttaaaagtcagtactaagctcatactgggtgttaatacattttaaaactgcaaatccagtttactgaaattggagaatatcagatccccttccaagagaggcataattgtagcttactgggtgaattcaccttttatattgacagtctagccttatgaaccaattaagtttgtagtttctgcattcttcctgtgacactgaagactgttttcatcaatgtgaaaaccatgttatctaagctaaatcaaaatccactctcattcagaatttattcttccttttatttctcaacaccagtgacatgttcccaagttctctgcctttgtggctccttagtttccagtgtggaatgtcttatttctgaaagcaacctgtgattgacaagccttcttggctattctgtagtttaccctaaaaaaaatctgttctctctgtcggctcattagactgcttttccttacatggtactctgcttttcccctttatttcaagcatttattaaaactaaactatgtaccaagcatacacaaaatggatataacctaactctttgaaggctacacttcaaagaaacagccttggtgtttacatattttgactagaatattatttccctaacaagctgcataaaaccattcctgctcagtttgtaattatacaccaaaatattgagcacaatttcagtagctacttctacagcacatcatataaagtgaattgctggagccaactcattaggtcttattccaaagatttttaccaacactttggccctcttttgctgacaaaaaaggattcttaagccttttaacagctttataacttccttattagagttcactcactaacatatcctgttaacaaaatgaagtgcccatccttcttgggaaacactctggagaatatttcctgatttcatcgcacagctttgtctctggattagtaatcatctaatacgaaactgaggatatgagtattatgtttcacaatgttgtcttcaaggatataaacaactcaaaatttaagtatttgagtagcactgtatcacattattattgccgtgatattttcagaagaaatctgaagtctgcgctaactacaggccataaaatatggccatcttgccccaataaatggagcaaagttcaaatctggatcatcagaaaaagacaagaggcacatttctaaaccaaatctgattgccttgaggaaggaaggtactgaacctgttagagtacatctctgaaggactgagaatcaagtccttcattccctcgccccctaaaaaaatccaatcaatcatgctgataaatgtcttagttacaggggagaaaaaatagacatgactaagctgaaaaaaatcttctggctttgtatcttttctaggcagtgctgttcctgataagacacatgacacaaaatatggttttgctgagtatcaaggtaagttagggaaaatagtattttttaaataggaaaattagatgacaacagcaacaggtaaagaagccttgggcttctgaggtagaaatactagcatccctacataggcatggtagataatctgaaactagtacaagtgctggcctgttatagcctgtctctaccgtaatcagagggaaaagtattacaatccagcaaaagtagcccttcaaaatctaaggaggagcatttcatcagatatcaataaatgaaccctcgctgcatacaaaggcaatacattacgtgctgagtgaccaacttcaaagaaccttctgctgttctgaaatttaaaactactctcatttcctcaagcctgtattttatgtaatgaaacaaaatgcacatcatatgtctcctgctgcactgtaagagtaaacataggacccctcccaccaaaaattgtgcaaagagcccttccccttcagctttttgctatagaaatatcctactacttccctgaaaatagtatatgctttctttggcaagtggaatatcaccctgttactctctcccttactctgcttcactttttttcgcataacgcttaagattacctaatattttacatgtttatcatgtctctcccaattagaatataagcttcatgagggcagagatttcaaatattttgttcacagatgtattcccagtatctacaactatatttagcatgtagcagattctcaaaaatatttgtaaaattaataaaatttaaaaatccctattatattggaattgttaaattaaaaaaaaattttggccaggcgcagtggctcacacctataatcccagcaccttaggaggccaagacaggcggattacgaggtcaggagatcgagaccatcctggctaacacagtgaaaccccgtctctactaaacaaaatacaaaaaattagccgggcgtggtggcgggcgcctgtagtcccagctactcgggaggctgaggcagaatggcgtgaacccaggaggcggagcttgcagcgagccgagatggcgccactgcattccagcctgggcaacagagcaagactctgtctcaaaaaaaataaattttttttttaagacagggtctctctttgttgcccaagctggagtgcagtggcatgatcacaggtcactgcagcctccaactcctgaactcaaatgatcctcccacctcagtaggtgggactacagatgagtgccaccacacctacctatttttttttttttgtagagatgagggtcttattatgttgcccaggctggtctcaaactcctgggctcatcctcccaccttggcctcccaagtgctgggatttacaagtgtgagccactatacctggccaaattttaaaatgctaccgtatctgtgtatgaatatgtgtgaataaatttacagactctagggtgtaattcacagggtagaccaagtcaagagtcagaggatcagaagcttgggtggggagataggagagtgattgcaaaaacaaagcaatctatcttattaaatggacgaaagggatcaaacattatcagtaaactattttaaagagtgaattaaatgtatctctctatcctttctatgagtgtagtgaattcagattcacctcagattagttgaattgacactagttttcttccctgataaagcttttaaaatttatttagtaaagtggccaggcatggtggctcacacctgtaatcccagaactttgggaggccaaggtgggtggatcacctgaggtcaggagtttgagaccagcctggccaacatggtgaaaccccatctctactaaaaaaatacaaaaaaaaatttagccaggcgtggtggcgcacacctttaatcccagctacttgggaggctgaggcaggagaattgcttgaacctgggaggtggaggttgcagtaagccgagatggtgccactgcactccagcctgggagacagagactctgtcccccccacccaaaaaaaaattagttgttttcctccttaaattacagcctgcaagattgaaacagagtttccccatttctattttgggatctgactgagtcacaaggtagtcttgacgaatcactctgctctatctctcagtttactgaggctgcctgggaacttgagctgtcagccaaacaggaagaagggcccttctgcctactccaaaaggcctcagtcaaatggatatggtgagatttaatgatggatataaattacagcaaatggatttcctatagggtgagggaaaaaaaaaaaagcaaacattttacttaaattcctctatacaatttagggctggcagaaagggtagactattacaatgtagctgagcaaatttttccatgtttgcataacatgtgttttcaactaaagatactccttctatagtcctactatatacaacaccccaaaaaacctcaaatgtaagaaaaagcaatgtgacagatttgaccctggccaagttacactgtttttttttttttttttttttttttttttttttaagtgtcagtgttcataaaggccctttttctttttcaaggatgggtataaagtgttactcggccgaacgcggtggctcacacctgtaattccaacactttgggaggccgaggcaggtggattacgaggtcaggagttcaagaccagtctggccaacacagtgaaacccccgtctctattaaaaatacaaaaaattagctgggttgtggtggtgtgcccctgtcacaaggtagtcttgacgaatcactctgctctctctctcagtttactgaggctgcctgggagctgtcagccaaacaggaagaagggcccttctgcctaactccaaaaggcctaagtcaaatggatatggtgagatttaatgatggatataaattacagcaaatggatttcctatagagtgagggaaaaaaaaaatccagctactccggagactgaggcagaattgcgagaacccggcaggtggttgcagtgagccgagattgtgccattgcactccagcccgggcgacagtgtgaaactctgtctcaaaaagaaaagaaaagaaaaaaaaaaaaactattactccactccccaccagaaactcttattttttcccccctatgtggtcatgaattcctcctgggtgcatagctccctaagttgttctgtgttttagtgcttataatttcccacatcccatgatgccccttgatagaattattttttctgtactcacacaaatggaaacagaagagatgaaaaaccctggggatgcggcctcgcaggtctcaaactgatcggctgctaagcacaacctgcatatctcttggctgagttcctttcttggctcagttagattttgcatgacctaggaggcttaggacccagggggcgcctttcagctgaaaaacagctcgcgctgcagcaagctagctgggaagctcccagttctaaagagaggctgtttaccagaacagcataacaagggcaggtctgactgcaaggctgggactgggaggcagagccgccgccaagggggcctcggttaaacactggtcgttcaatcacctgcaagacgaaggaggcaaggatgctgttggcctgggtacaagcattcctcgtcagcaacatgctcctagcagaagcctatggatctggaggtgagattacaatctttcctttccgcagcaacttcatgaaacagaaggggtaaagccccctatttcccaaacagggccaggatgacaggaaacgaagcgtttagccggtttctgttgtcccgtgaaagcttttccacccctcctttccttgtcaggggcttgcagctccatctttgccattaagaacaaaggcaagaagccactttctctctgcctttccttgctcatgagtggatggagcttgggggttcatctcccctactccccaagtcctgttctttctaagccctttgcatggtgtggtcctccttccccagcctccttctgtggttctcctgcagaggggagtgggagcttggagtctcatccagtcagcgatgaggccggtttcctccgtttgaggctgtcttgaatcttttgcctgacggagtcaaggctcctggagaattctcctgggagggagtatttgccttttaaacgggcagaaggtggccgtatccgtgaaggaggaaacaccggagtttatgtaacgtggccattacaacacagggacaaatgtcacgtctgggcgccccccgtcccaaaactcccagctcctcaaagggaccctaagccaggcctcctcctctccatctcctcctccaaagtggtcacaagttcaagagtaacaacgctttgcacttctgcagcgctttccaggtttcaaaaataaataaaacctaacagtctctgagcgttgactgggggacaggcacaggctgggggcttcacaccctgaggtgtgcgtggagttggggggggggggtgcgtggggcgtgggggtgttgccacgagaggagagggaggcccagcagggcccggggtcccctaaccaggctgaggttcagcccgggtggtcccggctcccctgtccgccacgctgggcgtcttccgttcgctgcccgctattctgtgtccgggggcttcttttcctcacaggctgtttctgggacaacggccacctgtaccgggaggaccagacctcccccgcgccgggcctccgctgcctcaactggctggacgcgcagagcgggctggcctcggcccccgtgtcgggtaagtgtcctccgggggacggccccggggctggcgggcggcggccgcgttcccggtgccagccccggcacacatttccttctctcctctcttaggggccggcaatcacagttactgccgaaacccggacgaggacccgcgcgggccctggtgctacgtcagtggcgaggccggcgtccctgagaaacggccttgcgaggacctgcgctgtccaggtacctgcccgggaccccgggaatccccgctcctggcgctgacaggaagcggctgagacactcgtggcgcacgtgcggccgcgcgatgccggccggccccgctccgcctccgcgccgtccgattggccagggctgtctccaggccgcggggctcaaagcctattggccgccgccgccactcgtatgagctcatccgccgcgagcgcttgtaaacaactgcgcggggcgaggctggggtgaggctaggtctctccgccgcgcgtcctgaggagtggcttttggcccctcagcgtttattgaccgtttgcggagcgtctgcagtgtgctagacccacactgctcacaaccccagctccccaacctcccctgacacacaccgcgggaagaagtcgtttgaggcatctgagcttcagagaagttaagcgatttaccaaaggcaatggcaggggacagatttgaattcacgtttcttagattccagagcgcaggctttttgctcccaaagcagcaagagagttttctaggtttaaatgggataatcaaaataaagcatttattttttattttttattttttgagacggagtctcgttctgtcacccaggctggagtgcagtggcgcaatttcggctcactgcaacttccgccttccgcgttacagtgattctcctgcctcagccgcttgagtagctgggataacaggcgtgcaccaccacgcccagctaatttttgtatttttagtagagacggggtttcaccatgttggccgggctgctctctaactcctgacctcaggtgatccgaccgtctggcctcccaaagtgctgggattacaggcgtgagccaccgctcccggcacaaagtaaaacattttacctaaggactggcacagagcgtacgcttagatgtgagctgctcaaaggaagcatgggttgtttcctgaagtagaagtggggggaatcccctgcagaagaacgcaaccgagaggggccttgggaaatagcaaggatttggacagataaagacgtgggaggtaggagagaagcccttccctacggccttcctctctcatttgccttgtccctgagatggttcagccctctcaggcctgatcttacctctggggcagaatttgactttgggttgtgtgtggggggaaattcttaggtgacccaccttcatctaccctaacactcaggccaggttcagctgtggaattcactcagggcagtccctgatgagagctgtttcccacctcatctccagagaccacctcccaggccctgccagccttcacgacagaaatccaggaagcgtctgaagggccaggtgcagatgaggtgcaggtgttcgctcctgccaacgccctgcccgctcggagtgaggcggcagctgtgcagccagtgattgggatcagccagcgggtgcggatgaactccaaggagaaaaaggacctgggaactctgggtatgacggtcccccacccctgccctcgttgggattcatcaagagatgtcatttgctgattgtctagggtgtggctaatgggaccttgtgtcctatccttggcaggctacgtgctgggcattaccatgatggtgatcatcattgccatcggagctggcatcatcttgggctactcctacaagaggtcagtagcttctcttctgggccctcttaggaggaggggaggaaggtacacaaagtcaaactttgtggctttcttacccaaaaggaagcaagatgttgaaaatcagctcaagatgtagagacttggtcctagtctttatctgctgaccttggacaaaccctttcctttggtgcctttacacctcacttaaaagccttgtgagggatgttcttgttccgcattttacaaatgaagaagcctctgtcagagacttgctcaaagtcacatagcctaggagtggcagaacctggattcagacccagctcttttgatagcaaattccctgctgtctgatcccacatgcctggcattgaagtgagtggcactgcagaaatcaggcttgacactgattgcagggaccttaagaccaaattctttctgtgagttataaaattctgctactagaaaaggtttccagccactgttgcagttgaggcttaaatttcctgagctataagcagtgggatctcctctgctagggaagaaaaaagtgagttggagaacagaaagtctgtttgccactcttcaccacgtgtgagaaagccaaagaggctacttgtgaaactcaaggacatgacctgtggctgggacagcaggagaagaatgcttattttgaaaggtcccacgagatgtccgtcagtgactggtgcatgatggtaagccagactggcattcatctttacagcactggctgattgtggaaaattatttgccattcttgggcaaaatcgggggatttgacttctagccctgggtgtctgtaatattctcctctgtggtctgagaaaacttcctgtgaggaaagtgacacagtagcctgcatttttccttcctttcctccctccctccctcccttccttccttcccctttctttccttcctttctttgatttttttttttcagggtctcgctctattgcctaggcttgagtgcagtggtgcgatcacggctcactgcagcctcaacctcccagggcgcaagtaattacccccacccacccccactgagtagctgggactacaggcatgtcccaccatgcctggctgatttttaatttttttatagagacagggtctcactgtgttgcccaggctagtctcaaactcctgggctcaagcagtcctcctacctcagcctcccaaagtgtataggcatgaaccaccatgcctggcatgcagcctgcattttccagtgatgagggccatgtctgagcccacagcctcagtggatcacccagcagggcatctttaaaggccttgtagtcaacctcctcattacagatgaaaaaggggaagtttgggtataataataacagcagtagcaaacatgtaccgtatgccagacactgcttgaagcacatgctttaactcataatcacccttatgaggtaaatgctgtcatctccaatttacagatgaggaaactgaggcaagaggggattatatacgttacctgaggttacacacctagcatttggtggagagaagtcctttaactagctatctctgtgaccctgggcaaattgcttcaatttcctactccacatcatggtgtggagctatggcttttgactacttagctcagggtgtggcacatagtaggtggtcagtaaatgatggctgtttttcttttctataaaatgtgtggctgggcgtggtggctcacacctgtaatcctagcactttgggaggccgaggcgggcagatcatgaggtcaggagttcgagaccagcctggccaacatagtgaaatcctgtctctactaaaaatacaaaaaattagccaggcgtggtggcgggcacttgtaatcccggctacttgggaggctgaggcaggagaatcgcttgaacctgggaggctgaggttgcagtgagccgagattgtgccactgcactccagcctgggcgacagagccatactccgtctcaaaaaaaaaaaaaaaaaaatgtaggtaatggaccaggcgtagtggctcacacctgtaatcctagcactttgggaggcagaggtgggtggatcgcttgagcccaagagttcgagaccagcatgggcaacatggcaaaaccctgtctctacaaaaaaatacaaaaattagccaggcatggtggtgggcgcctgtagtcctagttactaaggaggctgagatgggaggatcacctgagcctgggaagtcgctatggtgagccatgattgtgccactgcactccagcctgggtgacagagtgagatgctgtctcaaaaaaaaaaaaaaaaaaaaaaaagtgggtaatggactagtactctctgatttcttatgatgcaggaagcagaggtccagagagggaaagtattgacttgagaggacatcctgacgcccagtctgaggttgtttcccacaatgggatgcttgacatgcaggtccagggacacctgcttgttcatttcagagttaatgacatagtggccctggccttacaattcataagcagacctaagccacattggctgagtttagtccttgaactatctcctttttcctcagccacccaacagcatttggctgtcctgcaatcctgtgacagtttccaggccttccaggtgcttgaactgactaaacattcttaattctgagctcagttctggtgtccagtggaagtcttttttcttctagatttgttcctctaggctgtcacgagactgccctgaggcctaaaatttattttcctgtaaactcagggcaaggcacccagtcatcagactccccgtcactaacgaccagatcacccctttcttcagcagaactgctctgagaacagactgtacaacaggaaaccgcatgtgggcttaaaaacaagcttgcagccttcatctcttcctaaagtcagagagcagagtgtcctgaaaagagctgtaggttgagtgtgggttcaggtgccctctgagccttggtatcttgtctgttaaatggggatatatcctccctccacatctacccatctaagattataagtattaaatgtaaacagaaacaatagcacaccaatcaggtaataatcacaatagcagccaacatttatttcatgctttcttaataagtaaggccctactgtatgctcttccctgattatctttttttcttaatttttttttttttgagacagagtctcgctgtgtcggctcactgcaaccgccgcctcctgggttcaagtgattctcctgcctcagcctcccgagtagctgggattagaggcacccgccaccatgtcctgctaatttttgtatttttagtagagacggggtttcaccatgttggccaggctggtcttgaacttctaacctcaggcaatccacccgcctcggcctcccaaagtgttgggattataggcatgagccactgcacccagcctcctgattaccttgactaagcctcacaaccacactaggagcactgttagattttacagtgaggagctgagacctagcagagttaagtacaatggccaggctacacagctagtaatgtatgtctgaggagtattagtatctccagcaagtccagtgaggccaagtagcctcatgtaaatttgctttgaattgcaaaggaaagtaggaaaaatagaaatttaaaaaaaggctgggtttaaagtcagaagaaacaagatctagttctggaactttcacctattctggatgtgacactggacaagttatttaccttctctggacctcaatttcttcatctgtactgtaagggggttagatatggtgatactcccaactctatttcctaaaaagacaatattgccggtgctaagactgggttcaaatcccagctctgccatttgcttgaacaaatagtgtaacttctctgcatctgccttcctatctatgaaacagatcaaaatagataccacataggttgtgaggatgaaattggacagtatagtttaggcatacaattggtgttctatagcctgggagaggaagttggaggcagcatacagtagggccttacttattaagaaagcaggaaataaatgttggctgctcttgtgattattacctgtagctgccttgggaacttttcctgagcagcagtgtggcacagcactgcctctgactgggaaaatagcagcggctcagagtaataattgaagacgacctgtgtagtctgaatgaggtctgtggtgcttccatactctgggagaggaagttggaggtaggcagcagcttcctctacacctgctctctctggccagctcagctcccagtcccaccctggccttggagcaagcagtcagggtaggtactgtaagccttgagctctgccaaaggccatgaggcttgcctaatgggatggagcttttccctggctgggatgggtgggcaggcaccaggcttcctcttagggagggagggctgtaaatgggggtgggtgggagctcagcctggccgggtctttgtcctggtagtctaggccacgaggttcaaatggccagtctgtgactgaggagctaagtgtactgtctgcactagcttcagagggaggtcttattttctgataaaaaggggagggaaaaactgtaagtcaacaccactccactcccttaggagaggaactaagtcagtgaacaagccttttgttctttcttggctgccacacaacacccaggctaaccaccccctacccccaagcagtgagaaggggctaggctgcctgatggtcagtgtagcaggcctagtggcctctcaaaggtcacccaagggagctgggagcagccactgcatctctaggactcacaggcaccattaacagcaggcacatgggattgagtgtgcttccaggcttccaaatggatgagactaatccagactagtgccagcatctgctttctttacccttgactgctcttccagccctgctctgcctcattaatacaaattgatttttttcccctaaagacttgtatatgatgcagcctggccattagcagcagctcagctggccacaggtaaaggaggttgctgaggaaagcaaggcgcggaagttaaactcaaaagcctcagtttcttcatctataaaacagggattaggctgggtgtggtggctcacgcctgtaatcccagcactttgggatgctgaggcgggtggatcacctgagatcgggagttcgagaccagcctgaccaccatggagaaaccccatctctactaaaaatacaaaatactctgggcgtggtggcgcatgcctgtaatcctggctacttgggaggctgaggcaggagaatcgcttgaacctgagaggcagaggttgcagtgagccgagattgtgccattgtactccagcctgggcaaaaagcacgaaactccatctccaaaaaaaaaagcctgtagctgacatttagtagatgcttattaaaagtaataagcatctctgggaggctgtctcacagcaggatgatcaggtcagttttctggacaactttatgggttaggtccgaagttcagatagttctctgggtctctggggctgaaagaacaaaactgtgtcttgctttaagagtctctatctggccaggtgcagtggctcacgcctgtaatcccagtactttggggggtgggaggatcgcttgagcccagtagtttgagaccagcctaggcaacatgttgagaccctgtctcaaccataaaaaaaaaaaaaaagtctctgtcctttactttattttcattgagccccggtgaagctgtatgaagtccatactgctgtcaccctattttacagatggagaacctaagaccagaggtgcaggagcttcttgttgagtttaacgccgtcttgcagaatggatatcctagaatcctggacctgagtttgggtcctggctcagccactgatttgttgtgacaatggcaagctgctgctcttgctgagcctcagggatgctatctaatgagcaaagctatgcaggaggcatagcctgaatgtttgtttgtttttttcctgccagggggaaggatttgaaagaacagcatgatcagaaagtatgtgagagggagatgcagcgaatcactctgcccttgtctgccttcaccaaccccacctgtgagattgtggatgagaagactgtcgtggtccacaccagccagactccagttgaccctcaggagggcaccaccccccttatgggccaggccgggactcctggggcctgagcccccccagtgggcaggagcccatgcagacactggtgcaggacagcccaccctcctacagctaggaggaactaccactttgtgttctggttaaaaccctaccactcccccgcttttttggcgaatcctagtaagagtgacagaagcaggtggccctgtgggctgagggtaaggctgggtagggtcctaacagtgctccttgtccatcccttggagcagattttgtctgtggatggagacagtggcagctcccacagtgatgctgctgctaagggcttccaaacattgcctgcacccctggaactgaaccagggatagacggggagctcccccaggctcctctgtgctttactaagatggcctcagtctccactgtgggcttgagtggcatacactgttattcatggttaaggtaaagcaggtcaagggatggcattgaaaaaatatatttagtttttaaaatatttgggatggaactccctactgacctctgagaactggaaacgagtttgtacagaagtcagaactttgggttgggaatgagatctaggttgtggctgctggtatgcttcagcttgctggcaatgatgtgccttgacaaccgtgggccaggcctgggcccagggactcttcctgtttcataaggaaaggaagaattgcactgagcattccacttaggaagaggatagagaaggatctgctccgcctttggccacaggagcagaggcagacctgggatgccccagtttctcttcagggatggatagtgacctgtcttcattttgcacaggtaagagagtagttagctaacctatgggaattatactgtggggccttgtgagctgcttctaagaggctaacctggaaactaagctcagaggcaaggtaataaagcacttcagggcttgctccccaagtgggcctgatttagcaggtggtcctgcgggcgtccaggtcagcaccttcctgtagggcactggggctagggtcacagcccctaactcataaagcaatcaaagaaccattagaaagggctcattaagccttttggacacaggaccccagagaggaaaaagtgacttgcccaaggtcgtaagcaagctactggcatggcaagagcccagcttcctgacggagcgcaacatttctccactgcactgtgctagcagctcagcagggcctctaacctgtgatgtcacactcaagaggccttggcagctcctagccatagagcttcctttccagaacccttccactgcccaatgtggagacgggttagtggggctttctatggagccatctgctttggggacctagacctcaggtggtctcttggtgttagtgatgctggagaagagaatattactggtttctacttttctataaaggcatttctctatatacatgttttatatacctcattctgacacctgcatatagtgtgggaaattgctctgcatttgacttaattaaaaaaaaaaaaagactccacattgccaagtttttgaggggtaacaggaaccctccgtgtaagttgagaagctttgggttaccttgtcaacacctatgtggcaagctctgggccttttcttcattcatcctcgccctgttactggaaagtgacaactgcagcctgtgtccagatttttttttttgagatggagtttggctcttgttgcacaggctggagtgcaatggcatgatctcgcctcactgcaacctctgccttgtgggttcaagcgattctcctgcctcagcctccagagtagctgggattacaggtatgtgccaccacacctggctaatttttgtatttttagtagagacggggtttcaccatgttggtcaggctgttctcaaactcttgatctcaggtgatccacctgctgaggcctcccaaagtgctgagattacaggctagagccaccgtgcccggcttgtgtgtccagattatcatcatcaggaatctttcaggttgaagcaggaaagacaggtgtgcaggcgtcccaacaaggtggttggtcattgcaaatcctctccccttcagcaattgtttccaaggtggaggtagttaaaatgaatatctagacagcccttgttaaaggctggagtgcggcaggggttgggtggtgggtgacgggggtggtgctgcagcagccaaagggggaataactgcagaggaggaagggtcactgggctgcctgcagcagccctgggctgaggaagttccctgcaaggtgactactatgactccagaagaaaagataccaacaggagtgtctcctggacttttagcaagggatttcagccacaggttatcagcctcaggaacacccagatgacctctgcccatgcccagccattgctctgtggttctgccagcaatgcgtactccagatcatcagtttttttcgggaaccatattctgtccttaagttggattcttcaagctttgagagtgcctgggagaaaacacctttgggtttacagatttatattgtgcccaaggccccactaaccagatagcattgtccttcccaatggtcactcttctacgacatcccccacatgcagaagcaagaagaaactggtcttctcctctcaagcacttgtaaagaaacacaaggggtggggtgacttgcattcatttcttcccattgcaaaggtggcacccagcactgaggaaagcaagccaggatacccaggctatggaagtattcatatagagaggatgaaagggtagggctcctaaggaatgactcagctggcatgtgagagccaggccaggaaaaggtcatagtcagtcacacctgctgcaaggaaggggctgcctcaggtgggatgtacatattctctagagcagatgggtgtctgcttgagggttttagacttgggtgcatgaaaactctctgctatggggagtttgtgtgggctaggccagaaggtggctagcagaccctctacatttatgtccctgagccaatcatgttttcactctccatattgccagttatgttaactgcttaatttatttagtctgatcaatggcccagttcaggcccaccactcctacacttgctggggacagccaggaaacaaccagccacacaatgctgaactgtgctgctgctgggagtccagggctcagccctaaagcaagcttgcaaacttcacacataagtacagtctatatagcaagtaaactctgaccagagatgacatctggtcccacaactcatcaggtctatgtacaatatttcacataccacccaatagataagataatattaacagcaaccactctcctttatcaattccccctgctccaatacaaccaccacacattgcattaataccccaaacccattcccaatttattaaatatggtgcaagctcatagacacttagaagaggcaaatctagttgtgatgaagagttcctagagctctgggagccaagatggaggttttccagtacctgcacatgtggctcaggaggatgctgcccaggagctaatgagttgggagagcaaacatgggaggtagaagtcagatggcccagctcagggagctatctctctcagcatctcagctttgagactctgccaccacctcttcccagcccaagctgctgcctaaaccaggcatgttgaagggtgagcagtggttgccatgaagccaagaccaagagattgctgagactcccactcccctccctcagactctaggcctgtgacaagccacactgtcctccagaacccatcgagctttaggcaaaatgttttaggcatctgactaaggagcccacccgagtatgagtaacagaagccaagatctgagctttctagagggcagggcctctttctagtcccccagcctcttcctttgcttgtgactgtttgtttcagacagaaaggatgttgtccgtaagttctcagccagtctccagtattaagtttgaaaacatgaggtggaggcttcctctcacattgatgtggtccctgggctggctagagccagtgagcaggtaaacagaagccagccctttctctaactcctggcctgttccaccacatattaagggactcttcaaaacctactccctcaaccttgctccaggaaggacaggatctggagtagaaagggggagcatcactgactttttcacaccctttgagccatcagtctttctttcgtccacacacttgaagtcctcctgcacccagctggactagtgacttcagagttcacaggcaggttcaccctgggatcctgcccagcaggtccaggtcacgctgattagtgtaagcaagagcctcccacaatccactgccagggagttcctgggtggattcgagtaacagattcctcctggcccaaaggccaggggtttttttcttcttcacagctttcaggcaagtattggatttacagacagtaactaggccccagaacctgtggagatacatttccctggtgctgcgcccacttgcctcctggggaggtaataggaatggcttgttctgcttctaaacattccgccaatccacaggaagcccggacggccctgctcacagcaggaatggggcacagaggggcaatgctggctgtagaacacccccctgcagggggctgggccagggctagggaggtgagtcccgggtcaggccgtactgcatgctcacagtgtggtccaactcctccagctctgcaggcagcgggatgcccagctcccccaggtacagggagagggcctcaaaggagtcctccaatttcgagaatgctggtctagaaggaaaagaggtaaattagaggcaggtggaacatgagcagggccatggggtgggtggaagggatctaggctcagctacttcctggttgtataacgtcaggcaaactccttcacctagtagtgcctctgtgagaaatgggcataatgttaccggtacctcatatatttgctataaagattaggtaacactataacaaggctggactagctggagttaatacttaaaaacaataggagaaaaacttccctcccatatcttagagaaaatgcagttatcaaaggtggaatcggaaacaccaggctcctagtgccacggaaatggcttggctgccccggaagcctaagacagctcaggcttactcctcctcctccatgtttatgcttaaatgtcatgtcacctcagtgaggcctgctctgacgaccatatttaaaattgcaactggtaccctgaacaatcgtctttacttgtcttgactctttttccatagcatctgccacattctaatattcaatatagtttacttattgtatctactgtatgatacagtagataccatgctagaatctatgttctatgagggtaagcacctttattttgttcgctgctgtaacccaagtgtttagaactgtacctagcacacagtaggcattcaatactgtatatatatattttttaataaattaaagatatttagaatgacaagaggtattagaaaacaaatactgtgtagcttcacaatttctcctcaagcttttacactggtgttactgaaggactgcggtccttggcctataaaggaacaaggtatagattctcccaccagaaaatttcaactctaatgtggaccgctggaaatcatttttttttttttttttgagctgcaccaaaggcgtaccctacctcgctttattaaagggcccgtgccgcagagtcaatataaaaacacaaagtcccatcagtttaataacaataaaaaaatccaaaagtggaaaactgagggggcaggggaagagacccctgggccaggggcacgaggagccctgctcatggaaccaggcctggccgcagggtcccccggtattgctgttgctacgaggtcggggggtagcgattgtcctatgggagccaccgttcgcctgggtcggggaccctcacttcttctggggtgtgctcagcttctgcatggcccggatcttgtccagcaggccagagatgaaggcctctgtgggtttgtaacagtcaaccagcagctccttgaccctggaagcccaggcatcgtcactctccatgtccaggagctcatccacgtcaatctctagttctgagatctcctcttcctggcagtcgtagaggcgcgtgagctgctccaggatccactcctctaggttgaggtgcttccgtagctccttggggtcatacttgatggtgaccttcccttggcgcctcactgggccctcatcatccgcgcagcccgggccctctcctgcggccccggggggggctctgaaagtagatgcgtggtccttggccgccactgcctggcctgggggccggggccggggccgccaacgccgcgccccccgcggtgccgctgtccgccacggcggcctccggggccacgtgcgcgcgtggggcccctccttgtgccgccgcctccgtgacgcccgccggctggctcaggttagctcgccggctccgcggcgagggcggcggcgggggcgcccgggggcagctgcagcatgcggagcccccgggcctggcctggtcgcgccccgccccctccccgccgatccgcccgccctttgtcccctgcggccgccgccggggctgccgccgccgaagcgctttctctatccggaaaccatttttaaataaagattatgtcccaactggttatcctgggagggtggagttgggggtgaggagaatgttgagggatatattggttaagggagattacagaagacgtatttcctgtgctataaactttggtaatgtttgaacttgtttttaaaagaaacatgatttttgatggcaggaaaagaaccccatttttgagacagagtttcactcttgttgccgaggctggagtgcaatggcgtgatatcggctcactgcaacctccgcccctgggttcaagcaattctcctgcctcagcctcccaagtagctggggttacaggcacctgccaccatgcctggctaagttttgtatttttagtagagatggggtttcaccatgttggccaggctggtctcgaactccagacctcaggtgatccaccagcctcagcctcccaaagtgctgggattacaggtgtgagccatcgcgcccagccagattctcgttttttaaccacacacttgaaaagacctagggtaactttggtaataatgaaattattacctgagaagaataaaggtaattttgaaaatacttcctcaaaggagaaattagctaaatgcataaaactgctcactgtagttaaatacctattgtaaagagaaactggaaaaacctgaacatctacattacaatatgttcagacagtctctcaatagaatttcatgttgtcgacaaaaatgataaacaggaagactggatagtaaacacaagggaaatgcagggcaaaatacagaactatttactataaaaaaaagtatatgtgtagatatggacaggggaatatcgaaagatgaatacacttactgtattcaaatggtttgggtgaatttccttcttttaaactttcttttaatggctgtgtttctgtgtcctatccagattacttgctgctatgtctttacctctctcttctccaacctgtacatatgtgttgtcagatggctcaggggttgacagccacattcttgacctcaaggcttctctcacccctgtgcttgcagagggctcaggggtggccttagacagaggcaaacgtcccaggaccctgtgagctgggagaaaaaggcaggataccaacctgctctcaggctccagtctgcagcagatggcggccagcgggaagaaggccgggggacaatctgtgggaacaaacttctcccagaaaagcttcacgttgaggccaaagtccagtgttcggggaaggcagtcaggatctgcatacacctgcccaatgatctgtagggtaagaagacagctgtttacaaaggactacagaggccacagatacttggcaagggaaagggatgctgggatgtggacaggaagaatggcagaagaggaggtggtaaaataggttagagagctctccccaatccccaatcatctctccaaatcttactaatccagacctgtatccactgagagctgggttactgaagaggactaagaaggggcttcactgcagaagccaagtgttccaaatcagcatctgctcctagcttccactcatcctaccctgccttgtctgtgtctccttgtggctgtgtgtgtgtgccagagttaaggctctatgaggtgctggatctgattcatgtctgaaaccctctggcaccagcccagtgctctgaacagaggtgttcaattaatattaaagaaaacaattttttaaaacaaatcttccttcatggccaggcacggtagctcatgcctgtaatctcagcactttgggaggctgaagcgggtggatcacctgaggtcaggcatttgagaccagcctggccaatatggcgaaaccctgtctctactgaaaatacaaaaattagccaggcgtggtggcgcacacctgtagtcccagctacttgggaggctgaggcaggaggattgcttgaacctgggaggcggaggctgcagtgagccaagattgcacctctgcactccagcctgggtgacagagtgaaactccatctcaaaaacaaaaacaaaaacaaaacattccttcattatcctaaccatcccttgtctctcctctcctctacccctcacaactttgtaggaattacagaaggctttgaatgtgtgtgtgtttgagtcgctgagatatgctgtcacctgactaaactcctaaaggtaggaatctttccaagattcctcactctgtccacgtggtacctggcacagggctgacacttcctagagtggctacttctacttgaagggaactgagaagggctacatttggcccaagagctagctagacagccacatgaacagtctcttgcccttccttctggaattctgagtctcatctgccccttatcgaccatgtgcaagccactgccctcttccaagcctcagtttcctcaactaaaaaaaaaaaaaaaaaaacctggccgggcgaggtagctcacgcctattaattccagcacttttagaggctgaggcaggcggatcacctgaggtccggagttcaagaccagcctggccaacatggtgaaaccctgtctctactaaaaatacaaaaattagccgggcatggtggtgtgtgccggtagtcccagctacttgggaggctgaggcaggagaatcacttgaacccagaaggcagaggttgcagtgagcccagattgtgccactgcactccagcctgggcaacgaagtgaggctccatctaaaacaaaaaaaccctgccagtccttctcttaagaccaatgaaacacgaacgtggcaaagatgtgcagatgcgttataaaccataaaaccctacacccatgttgattttagtcaagctagtcatccctaggaggagatgccccagttccgagggaaggcagagctgctaggcctgctgcctcgggcatggccttggtgccagagctcacctcacagagaacgatcccaaaggagaagatatccaccgtctcatcatagctctttccttggggaacacaggagagcacactgttaagtttacatcccttacctgctctgcactgggtctagggtcaatctaagccacagctaagaactagggctagaacaggttctgtagggacaccccacaggctgtcctgcgcagacaccacctgaaaatagtccttcctcagctgtaggtgaactgccttggagagcccttataacataacactgcctaggatgaaactgcacgttaaagtggaaaagaaccagactagggttcatctagcctctgccattaggcagctgtatgctcctaggcaattcactgaacttctctgggcctcagactccaaaatggattgtattcagaccatttctgaggcctcacaaccctgatttcaagaatcccaaccagcatctctggttggtttgagcattatccaccagagggcaccacacttcagttctcaccatggagagagaaggctaaagctgggacaatagcctgagctcttagcgatccctgaggcacaaatgccacagtcagaactcaccttatcccccatgatgggacactgatcagttcccagccccctgagctcaggagctaaatcgtgaggccccacctggcaagggaaaaatatcctcagctctgggtatccggtcctacgcttcacaggcctcccctggaattcccagggctctgatgcaagggcagcatctgtcctccctctgcgggtgtcccctccagggcttcaggactcaccgttcagcatctcaggggccatccagtaggggtttcccaccaccgtgtagcgcttcttgcggtcgttcttgcgcaaggtgcgtttcttggtggtggccttctccatgggggcccttttcctctcttccactatgagccgtgacagcccaaagtctgccaccaccacagtcttgtcctggtaggataaaagacaggtcaggacttcatggggatgttctcaaacctggccctggggaggaagcataggcaagagaagccactgagaaggggagaaaaggtgtatagcaagggagaatcagagcagaaagctctatcaaatagacacactcaggccaggcacggtggcttccacctgtaatcccagaactttgggaggccaaggcgggtgaatcacctgaggtcaggagttcaagaccagcctggccaacatggcaaaaccccgtctctactaaaaatacaaaaaaaaaaaaaaaaaaattagctgggcgtggtggcacacgcctgtagtcctagctacttgggaggctgaagcagaagaatcactagaacccgggaggtagaggctgcagtaagccaagattgcaccactgcactccagcctgggaaacagaatgagactccatctaaaaaacaaaacaaaacaaaacaaaaaaacagacacacttggcatttgtgtttctgagggtctggtatctgtgcacagcagactcccagcccacagtgggttcatggcagagccactggagccctggaggtgaggctcagggacttggagagtggaactcagaggtgggacagggggttgcttttgtttttccctgtcctgtcttattcctaaaatgatttcaggcagtggctagaaccaggataagacagaaaaaggcaaggtggaggcagtagatggggagacttgggggagacaagctctttgaatagctacagggcagtcatgtgggaaaggaatgaagattgcgtggtgtgggtctagagggcagagccagggccagccggtagacacccaggaagccagatagcaagtcagtaagacaaacaacattgtaaccaccacagctgaggggcagtgggaggaatgctggtctcaaactggtccctgtaaatttactagctcggtggcctcaggctgaggcttcaggtgccaccactgtaaaatggggtcagcaatgaactgttttacaagactactatggggcaaaagcaggtaaaatgacagggttttctacatatagtcaacaaacttctgaagtcccttctaatcaaattatttcaaaggttgctaatgagagaaggtgaaattatgtctgtgtgtgtctcggagctcccagaggacagagaagggcattggaagaagcaggaagggaaagataggagctcctaggcaacacctctgccctctagccagaggggacaagtcagcctcctttgtgacaaggaagccaggaaggataggaccctggaggccaggcccagagcagtgggacataccaacttgatgaggcagttgtgcgagttcagatcccggtggatgatgcacatagagtgcaaataggcctggaacagaagcatgagctgaggctacagggccagcaaatcaactagaccctgaatctggaattgggcgccatagatgctctcctaccaggccatgcccacccagcttcagaacccaacctggacaacagggccagggcctcctatggcctctcccttgtcccaataccaacaggaagcctggacttcctctgcttccctgctgccatctcctgcccatcctttggttcaccaatcactagcacagtggctggccaaagccctcacagctctctcctaatgtccccaacttcagaaaaccctggccgttgcagcaccccctccacctctacccattttacttagatccaggctgctccctcctccccactctcccaatctctggcttgagccactttggatccttcctgcctgcaacagagaagtgacttcttgctccagctagctctgtctttcagacattcacctcctctaagactccaccttccccactgtctaaactttaagctctcccccttcctaccaaaatgtttgtcaacaaatttgtttgttatgtctcctctccaggcctccaccactgactcttaccactctcaggagcaacttcctttctccttcccttgcaaatgtagaaggagccactccttgctctccagccccctgcaatactactttcatcccttaggctcctggagctgctcacacacccagggagctcttcctgaatcgctatagctcatgacctgcctgcctgcctgcctgagggagtgctcctcaaagactgtccacaactttcctatgctacctgatcctgagactcttgtgtgtctgtttttttcttccagccttttcagtgtcagccctgctcaaagccatctcctcttcacaagctgagacacccccaccagctacatggatgcctcttctgtcccacagctccagctgccccttctctgcagattaggtgactagcagcctctccctaagccagtctcatggagccagtttcctgcccagaagatgctgataggttctgctagcacagaacagcagggatcaatgctagctcttcccaaaccagttgctcaacaatcatggctatcccccatcccccaaatgtctggtaagtgacacctcaagccactcgtaactcctcctcctcctcctcctgttccctcattgccaaccagtctctccattctgactccacccggcctcccaggctcctgtccccacagccactaccttaattcagaaatttgaaatgtttcattagccccctatgcagggctccattccctggaccctccgcattccaccccaatgtactaaccatatcagtctctctttttttttttttttgagatgaagtctcactctgtcacccaggctggaatgcagtggtgtgatcttggctcactgcaacttctgcctcccaggttcaagctattctcctgcctcggcctcctgagtagctgggactacaggcgtgcaccaccacgcccagctaatttttgcatttttttctttagtagaaacagggtttcaccagttggccaggctggtctcaaactcctgacctcaagtgatccactcacctcggcctcccaaaaaagtgctgggattacaggcatgagccactgtgccagcccagactcattttggaaaaaccacagctcttaagctttcttgcttaaaaatcttttcctgccgggcatggtggctcacaactgtaatcccaacactttgggagggcgaggcaggaggaatgcttgagcccaggagtttgagatcagcctgggcaacaaagtgagaacctgtctctaccaaaaaaaaaaaaaaaaaaaaagaaaaaaaaattcaaaaaattaggtgtggtggtacacacctgtagtccagctacttgggaggctaaggcaggaggattgcttgagcccaggaggtcgaagctgtagtgagccatgatcgtgccactgcactccagtctgggcaacagagcaatatcctttctcaaaacaacaacaacaaaaaaacctccttcctgattcaagccccagaaacaggaaaaaaaaacaaaaaaacaaacaaacaaacaaacaaaaaaaccaaaaagccagtcaaccaaaaaactcttttacatttgtctcctatagtccagactccatagcttaaaacacagcgaccttgatgtacccccaaactgttccagactactactattttcatggacccccatgtgaagggcagtggctaaagtctcaggcttggcgaccagactgattagcccaggatcccagctctgtccctttccagtccagcttatctggaaaccaaggttgtcatgaggaataaacatgcacatgcatgttaatccctcagcccagtgcctagcatatagagggcactcagtacttgtcagctgttattatttctatgcttggaatcatttgtttccaggtgaaatagatgattttctcctctttcctcccaggtctttgctcctgtcacttcaatcctggtgcctctctgccaataagaactttatccaattctgatccttcagggctccgctagaactcatttccccttcattgatttcctaggcagtgaggtgctctagttggtctaagggccctcagcacctgaatacctgtgatggcaagcccaggccatctcaggctacagtttgcctctccagtttgccttgtccgtgccctgtttgcctttagagatgtgtaattctttgaaaacagggctgtgaactgagaacagttggctggggtcagtttcagtgacacagacaaactcaatgaatagctgctgacccagcccacacaagttgcataggaaggggtctctaccttccagtgaagcccacaattctcacacctctccctactctcgccctgctggcaggtttgttggtgggactcaccattccggaggcgattcctttggcaaacctgaccttctgctgccaggggaacggatcctgcagaatggggaatgattttcagaggctgttgagccctgtcccactcgtggtccaggccccatgggtcaatgtggtctcccagtgaagcctccctgtgtatgctcagtcccacccagcatggtcctttggaggcaaagcagggcccctctgccctttaagctcctagggtagtgatagcataggtgtctgacaacccaccaaggctcctggagactatggggtggtgtgctcaccatactgcgcagaaagtccttcagtgtgcccccctcaatgtactctgtcaggaggttcagcttcttatccttgtacagcacaccaatgaacttgagcacattggggtggtccaggctgcgcatcactttcacctgggggtgggggaagccaaggaaagctggtggttaacttctcactgtcttccttacctcttccctccaaggaatcagcttgacaagtgttaccacctgtatctcctacctcctatcttgtgatatgacagggcactaagatcaggatgagggaagaccaccaccatatagatggagatggcttcataggccttacccttggaactgcattgggagaactggggtgggagtggccaagtggcttggagggcaatacccagaccacaggtgtccccaacttaagttactccatgaagtaacttgggaggggtagtgaaaactgtaaatgcccaaggagtgtgagtgctcagggagctcccctccaggctcccttagcagggcgttcaggtgaggattataacattgagttgtactaaattggagtgttttcatgtccatcatcctcataacctgagagctcttctgaaccctgtatcttttgttactgcatcccttgtaccctgtttgtgttgcttttagtaagtgttcattgaacaaataattacgctgtaatttagagggagtgggatattcctctagggctcttttctgcttagtctttaagacagtaattccaaactgtattttctcttgaagccattatttgtaaggtcttctctcttccaatggtgacaccaacctcccgggccccctccatcttcttacctcagtcagaaaagttttctgggtctcctcatcacatcgaattaactctttcatgaccatcactttgcccgtggctttgtgtgtcacctacagggagggtgactgttaatggtgctgagaccagaggaagttctggagaactgtttgagaaaatctatgcagctggccatcccatcccttggagggcacactgagccgggtcagaatgacagagttcatgtgtggaagatgcagcgtggagcaacatgggactcacacggaagcaaaccctctttcctggagagctgggcatgcacagaggacaggcaagaacccagaaaagggaagtggggaagaaggcaggaggggatgctgccaagccaagcaggggctctggtcatttggcatagaagtgagtctcctgagtgaacagaagtctgggggcaggaaggtcagtgccaaagacatgcaccagggagctgggtggatcgggggtgagctctccagccctgctgcccccaagctgagacacacgtcttacctgaccccccctcccagttctcagcagaagaggaggaggaggagagaaagagagaggttagtccctgagactgttcaccagggaggcaggagccattcccctgtgtgctccttgtagcatgcccggtactgaggtctgcaggcacctaacaaacacccactgactggaggcaggagggccacaggcacagctcaacccaacctggatctccaggtccacaagctcactgtaacagcaacattgaccttaggtggcctgggtgggggtgaaggatacctctcacaccaacacccaaagccaggaaggaggcctggcatcctgcatggtgtggggtggggccaagtgatgagaaatccccgaaagacagtgacagagggactgggggcagaagagcaaagcaattgttgcctgcgctcaccttgatagcctgcccaaagaagcccttccccaggacctccccatggattaggtcacagggccggaagatctgctgtgaatagctgctggaacaacgaagggattctgagcggctgatgtcacggctgaacagcaggggctcctttggggagctggggccaggggacttggagatactgttactgcgcctgaagatgaggaaagacgggagtagggatgtgtagtcctcagagaccggccaagaaaccctggagggaggaaacttaggggcacctgttcattccaatgtctatagtttagatgttattattggggaacaggggctcttacatcagatgtatcattttggggttgctgacatcagtcatttatttaagcatagtaaaaacacattcaaaatgggaactctgcatacatcacacatagaacaattaactagattctactagctgataatgctcagtatgtgacatatatgacaacactgtagatggtaattcaccatctcccatatctgcttgatttaagtactaactggtttagagtgatagttatactagtatccaaaaaatgagcaaatgggattttttttttttgagacagagtctcgctctgtcaaccaggctggagtgcagtggtgtgatcttggctcactgcaacctctgtctccctagttcacctgagtctcatgcctccgcctcctgagtaactgggactacaggcatgtgccaccaggcccggctagttattgttattattattatttttgagacagagtctcgctctgtcgcccaggctgaagtgcaatggcacgatctcggctcactgcgacctccgccttccaggttcaagcgattctcctgcctcagcctcccaagtagctgggagtataggtgcacgccaccacgcccggctaatttttttttttttttttttttttttgatggagtctcactctgtcgcccaggctggagtgcaacggcgggatctccactcactgcaacctctgcctcccaggttcaagagattctcctgcctcagcctcccaagtagctgggattacaggcgtgtgccaccacaaccgaataatttttgtatttttttagtagagatggggtttcaccatgttggctaggttggtctcgaactcctgatctcgcgatccatctgtctcggcctccctaagtgctgggattacaggcgtgagccaccacacccggccctaatttttgtatttttagtagagatggggtttcaccatattggccaggctagtctcaaactcctgaccttgtgattcgcccacctcggcctcccaaagtgctgggattataggcgtgagccactgcgcccagcctaattattgtatttttagtagagatagggtttcaccatgttggccaggctggtctcaaactcctgacctcaagtgatttgcccgcctcggcctcccaatgtgctgggattacaggcgtgagccaccgtgcctggccagcaaatgggattttggatgatattttgcacatctttgtacctgtccatgtttcctgaattttaagatgataaacacgtatgatttttacagcaataaagtcactatgtttacattttcaaaagcggtcgataatagtcatggtcaatgactgttattttcacttactgaagaaggaacaagaaggttgaagtccacagcactgcaggtgaacagccctgcgaactttctctctggggtatgctcctgctttacttgggctacccagagaggactgacgctggatggctcttggcttgtcccgacctacaggtttacttacccttgtccttttgctctgcctcctgctgaccatgcccaccagagcacacaaggctagctgcccccctcctctgcatggtggctctacagatacctggccactcccaaatcttcccttttccaggccatggatttctagctcttccctgccctctgttgccctgcctcccactaatttcatcatactgaccaaggccaagaggcaatgggagtgagggcagcactttaatgagagggcactgtttccaacacatgccagctgagagggctctaacttactcagtttgtttggtgaggagagtggataaaaaaaaacaaacttttttttttggagacaaggtctcactctgttgcccaagctgtagtacagtggtgtgatcaaggctcactgcagtcttgaactcctgggctcaggcaatcctcctcctcagcctcttgagtagctgggattacaggcatgtgccaccatgcccagttaagttttttattctttgtagagacaggaatgtggcccaggctgctcctgaactcctggcctcaagcaatcctccggccttggcctcccaaagtgctgggattacaggtgtgagccacagtgccctgcccatctaattaaaaacaattattattattattttttttttgtagagacagtgtctcactatgttgctcaggctggtctcaaactcctgtgttcaagccatcctccgacctaggcctcccagagtgttgggattacaggcatgagccacggtgcctggccaagaacctgattcttagtgatactaagaatgtgtcacgtttactgaacactgtccctatggcagcactatacaactttatgtccttttccacatttaatccttacataattggtgagacagccacctttatcttaccatcttatgtcacagatgcagaaacaggctcagagagatgaagtgatttgtgaagggaggagctcagcctgaagccccagtagggtatcagtatttctgcctgggagccagtgctcttgacttcttttctgtaagtctccctacttggggcttccactcaaggcaacttctccttccccatggacctggcagaatctggggtttgggggttgttggtccctcaagtctaaaaaaaacgttcattcatcttttgctttattgttttcaaagtctttctacacaatttattcaatcctatctgtgcccctactccaggctctgagctccatgctttctccataggccatgttgcccttcagggtttagcatcactgcctcctgtccagcttaggagttcagtggacagagactgactctcaggtttctaaggaaacctggcagacagctgggtccgcacaggctctggctgtaaactgtgatccccacaggggcagctgggtcagcacaatcctcatagtctgtccctggccagctggttcctttcctaactctgcaggcttctgaaagccagctcagcttcatccgagagacagacataggacagaacagagccagggtgggaggtggcaccttagggaacgtctcctcagtgtcccctccagattctccttggtgtccagggtgctgagggcgtgggggtgtccggcattctgcatgtgaggagcgagccgggcctccagccgcagctggtccaggcgttgggagacggggtcatgttcaatcaacagctgaagtgtctggctcgtctggctaattgcatcctccacctgtggccaagagcagtataaagctcccacaggctgccccatcccaggccacccatggccaacccagatgactcaggcacagtgtggccagtgctcaacttgtctaatggtggcctttagctgccagtggcctcacagtgccctctgcctggcatcctgtcagctctcccgtccatcaaccatccctgctaccctgggaacctgttacgctgaaataggtcaccagtggtcacaggctcaatgctaagacaaagagatgggctgggggtaggaaaaggtaaaggctacagcctgatttctcagaggatctgttccatgtcccaccctcacaagacagattagacacacactctacctcctccactcgaagtgtgcggacgggggtcccattgatctccaggatgcggtccccagggtggatggcgtttcgattgttgggactgatgtgcatccggttgaccctgggccagacaagagttgaggcagggtaaagatgtcctaaaaacctgcttgaccaattctgcttgtgcagggaaggtttaccaggtcccaggccaccagtggcccctaaggggcccaggatacccacacagaaaggcaacaccttttccaggatgccccatctcagtgaagggaattgccactcaccctgtggcctaagccagaaacttgaacatcatcttcccaatctggagttccctcatctctcctactcccatctctaagaactctgccttctttccatcattgtagttattcacatctcttacctggatcacggtaatagcttctattttttttttaaactttgtttttaatttttatttgagatggcatcttactctgtcatccaggctggagtgcagtggcatgatctgggctcactgcaacctccacctcccaggctcaagcaattctcatgcctcagcctcctgagtaactgggattacaggcgcgcaccaccatacccagctaatttttttgtactttttgtagagatggggttttgccatgttggccaggctaatcccaaactcttttttttttttgagatggagtctcgctctgtcgctcaggctggagtgcagtggcgtgatctctgctcacagcaagctccgcctcctaggttcatgccattctcctgcctcagcctcccgagtagctgggactacaggcgtccgccaccatgcccggctaatttttgtacttttagtagagacggggtttcattgtgttagccaggatggtcttgatctcctgaccttgtgatccgcccacctcggcctcccaaagtgctgggattacaggcgtgagccactgcgcctggcctaatcccaaactcttgacctcaagcaatctgcccaccttggcctcccaaagtgctggcattacaggcgtgagccactatgtctacgtctggacttttcttttaattaagaaaaacagagacggggtcttgctatgttggccaggttggtcttcaactcctggcctcaagcaatcctcccacctcagcctcccaaagtgctgagattacaggcatgaaccaccatgcccagcctacaatagcttcctaactagtctctatacctttaggctttcccctctccaatccaacctccataccagtgatccttctaaaatgttaacttggtcacaacaccttgctgcttaaactctcaatggatctgctggattttcataatccaggccctctatacttaacagccccttttctggccacactcaacctacatcagacatgattaagactcctacttttggagaaatgcttctccctctgccctgaacacaattccctctcctcttcatctaataaggttgtagaacagaccttagctcctcctgacttcccaaactctagtatctttcacctgctgtgcaagcactagcctagtgtccaacacatggtagatacacaatcaatatttacatggtaagcggccagaggtacgacattactggtattagatagacacagactctttctccatctggtctctggcctgaatctaggatagggtcttaacttcttttgggccatggaccacattttctccattcattctctcgactgacaaaataataatcaatcaactcctactatatgccaggtactcttccaagccctgggcatgcagcactgaataagacagcaagtttcttctggaatttacattctagtggaggggatagaagataaacaactaatacacataatcaagccagatgatttcaaagagcaaacatgacctgaaacctgacacctgaaaggtgagtgattcttgccttaagtatcgggtaggaagtagcctgggcagagagaacagtaagtgccaaggcccaggtacggttacagcatagtggggtccaggagaaagatatgagatgagaataaagggagttctgcatgagactttggaggtctaagccctctgaggcccatttacagactctgctcaagaacccctgctgaagggttctcaaaatacttactctttcacttgcacagtggtggcgtagttggagcaggcactctccacggacacggagaagccccgcctgccttcagtggtggccggcatggagatgagcgtgacagagtagggcagctgctcctgaacagactctgtggagagtctctcaaacatgggtgccagcaccacctcattgtggcacttcccactggggagagggcacaggggggaataagatgctagagtcccacacagaagccccccagcaaccactgcaccatgtggctttaagcaacagtacccatagtctcactaccaccctctttgtcatgattctagctggctgctcagaatgaggagcctgggttctcagggtgggctgggactgggggtgctgagctagatctgcagcaagtggtatatttggaaaaacactggcctgggttggggtgagatggtctgggttctcttcactctacctttgactcacaatgagaaccttgcccttgtactattctattccatgggccccaggctgacttcttttatcaaccaaggtggttggacagggtgagctctaaggggtctttgactttaatgttctgggatcgtccttgaagagtgcctcccactgggaggattgcagggcagagtgaagacattttcaaggttggtaaggaaaaagggtagagacatgtgtaaatcattctgcttacaagttaaagagctggttaagagcactgctgtggtaagaatccaatgctctgactaccctaacactccttctgcccaactcaccctgccactgtccctccccgccagccactcttatatgggagaggatagacaaaggaccactatcttaccagtagagggtggcatgctgcaccagtgcatatgcatccccatcctcaatgatcaccttgcagctcatacaggcaaagcactctgggtggtacttgaactccccagccacctgtgagcaggtggggagaagggtgtacaaagggaggaaggaagtgagttatcactgttgctggagtgaggacaggggtgggtgaatgacctccaagcaaggcccccgtcaaaatccactctttcactctctgccctagagcttccaaaggaagtgtcagattggtacctcctgtcatttctgagactgcacaaaactgttttggtctcagttatgagaagaaatccccagaagtaatcatccccactaaaaaagatcagttcttccaatacagggttggcaagtctgtcactatgcttaaagtcgtttgtccagagcaggtataggaggtagcccctctctctgccagcctattccagagtctccttttctgattccctaaagacaacctaagtatatcctcctctcagcctgtaacactctccttggaggtccttatccaactatattgtgtctcctctctgcctgcctctcctcccactcccaacgttcaactattaagtctttgagggaaggatcttacctttcacttagtaggtgctcaattgatacctgctagttgaatgaatgaataaataaagggagatgccctggctgatggaaagactaaaagattaacaggccacagggaactggaagcactgtcaatggactctgaagaccaagaggggcagatatgaagggattcactcaccataaaaggccctgtcatcagcagggagcacccatgacagaactccccaaacttcccccagtagtccttggggcagtagagcttcccatccttctcatagtaccagttggtgagggaatcctggcattctgaacacctgaaaggcaagacaagaactgaaattctcctggatccctggaaccaggccacataagctgtccctggttcctaggtatgacaacaaaatggacagtcctctttgatccaaagccaagatggggcaaagttacagccttgtgctatctccccaagggaagctggttcagactgaacaaggccccagaaaccagctctgtgttgcctgcctcagtggacagactagtgtttcataacctctttgggtcttggggccctctgagaatttgataaaagccaagaagcctcccctagaaaaatgaatatataaagaagatgtgtatataatttaggtgggggacagggtgtatatataaaggattctctgaaacctatttatggcaccagttaaggatctctggtcttgacagatacttcaatgaacaaaagcagtttaatcatctccactcttcaaaactgacccatcaccaacagcgttaccaatgtaatgttcttgccaaaaatacgttaagtataaaaaaactaatcaggcaaatctagaatgtgggttattctataagaataaccggtcttgactcttctaaaaagtcatggggagaagaaaaggcacagattttaaaaaccctagagacacagcaaccaaatacaatgcctcaaacttggattcaaatttagattaaaaaaggaaacagccatgaacattttttggaacaactgaggaaatatggatttggactataatattatattgtaaaattgccgtgaattttcttagatgtaatgatatctgacttatataggagaattcttagcagaaacatattgaactgttcaagggtaaaatcaagatgcctttaagttactctgaaatagttcagcaaaaataaataaataaaagtatacagatagagggagagagatatatacaaagtggcataacattaacaaatcatgaatctatgtgaaaggtatgtaggtgttctttgaactacattttcaacttttctatatatttgaattttttttcaaaataaaatattggggaagaaacccaacattctattagcactgtgtaagatgtacatgttagatccatagctcgctgggcggggtggctgatgcctctaatcccagcactttgggaggctgaggtgggaggatcacttgagcccaggagttcaagaccagcctgggcaacatagtaagaccccgtctctaaaaaaaaaaaaaaaaaaaaaaaaaaaaaaaaaatctatagctcccttctcccctaatgacctggctatgaagctccacctctcaaaagtctggtgtgttctcaggacttacctgcacagacaacctcttcctcccttctgagcttcccaacacacacagctaagagctccctggcctgctgagcccatgccatctctttccttctagctccttcttttccctattcttgttgtcaaggccttgcaccttccacagtggccacattcttgcttccaagaggtttgaacattgcttggtttgaatcttgatcctgccacttactagttacatcatcttgggcaagatattttacttctctggcctagtttcctcatctataaaatgaactgctgtgaaaattaatggaaataatatgtattaaaaatatagagagcagctgggcacagtggcttatgcttataatcccagcactttgggaggccgaggcgggtggatcacttgaagtcaggagttcgagaccagcctggccaacatggtgaaacctggtctactaaaaatacaaaaaattagctgggcgtggtggcatgcacctataatcccagctactcgggaggctgaggcaggagaatcactggaacccaggaggtggaggttgcagtgagtcgagatcacgccactgcactccagcctgggtgacagagtcagactctgtctcaaaaaacattatagctagctagctagctagctagagatagcttatataaaagtcctaatataggcagggcgcggtggctcacacctgtaatcccagcactttgggaggctgaggcgggcagatcacaaggtcaggagttcaagaccagcctggccaacatggtgaaaccctgtctctactaaaaatacaaaaattagccgggcgtggtggcgtgcactggtagtcccagctactcaggaggctgaggcaggagaatcgcttgaacctgggaagcggaggttgtggtgacccaaaattgcaccactgcactccagcctggacaacagagcaagattccgtctcaaaaaaaaaaaaaaaaaaaaaaaaaaaaaaaaaaaaaagacccaatatagtagaaactcagtatgtgttaacttctattaaagatgatgacaatgtaatggcagctcactttatcagccacttactgtcactagctggacaacttctcttagtagctttctctcattgaaaataactaatagcatcctattactacaaagagccaatgtgaagaggaaataagctaatgtatgagagaaagccttttgccaggcaagtgcattattataacttgctaagcactgcagatataaaagataaatacacagggcaccctacttcacctttcatgagcttatgaagagttgaggaagagaaagtctaaataaaactcaacaatgcaaggtgagaggccacagtgagttctactacttctgagcactgcgggaggtagagaagaggggcaggaatgagttgaagcagctgagctagggaagtctagagaagcaagtccctgagaatccctttatctttctggagtgcccaattcctcctgggtgctcaacaaacactgatggctatttttaccctatagcttttcctacttgtcttatggaaggggaacttcagggtcttaagggctgggtatggcatgaagagtatggctgtgaagtgtctcaaaactgcacagtgaggttggaggcagaggggaagactgttcttggtatgtggctcacactcctctcaatataagatacatgtgggatgagctctaaatgaggaggagagagatatgggttcaagttcttgggtgctaaattgccttggacaagcccctttccctctctgggttgtttccccacctgtgaaacaagaggacaaacaataccctgggtccccttaactctgtgcatatctgtgtttttccctagatgatctgaggttctaatcttagcaccaccatttaccacctaagtgatcttgggctagccccttcacttctcatttgtgaaatggcaatgtcatcacctactttcaaggtagcagtgaggattttttcttttttctttttttttttgagatggaattttgctcttatcgcccaggctggagtgcagtggcacaatctcggctcactgcaacctctgcttcccgagttcaagtgattttcccacctcagcctcctgagtagctgggattactggcgcatgccaccacacccggctaatttttctatttttagtagagacggggtttccccatgttggtgaggctggtctcgaactcccgacctcaagtgatctgcccgccttggcctcccgaagtgctgcgattacaggtgtgagccactatgcctggcctgcagtgaggattaaatgtggttctgaagaactatggggtgcccaacagagggctggcagtaggagcaggggcttccttcttgcctcctgccttctgacttagaagttcctgggcaaccatctttcttcttcactagactgttagctccctgaggacaaaaacagcatcccacttactcttggtagactcagcaccaagcaaaggacctggaagagcaaagccttaacaaatatttccaaactgaaaatggtaggagtggcaagaaccagtagcccaggtaggggagcacaagggttccatggctcctggtcaccaggtccttcttttcttctgtgtgcagacttatttgcacccaaatgcaggcctgggctctgttacgcccttgcaatggtatgtgcgccgcagggcatgggagcaccagaacacaccctcctttccattgccaatatcctgcttttgtttgctgcaagtagctctggccaggcccaggagagggagcagggagacaaacaagtacaggcatgcaggagacagccaggccagcctgctgggaagaacacctggctggagagcaacgtcaccagtccacatatctgtgtcaaggaatgcctttaaagggcacagccagctatgtggccaaagtcactgccacacatgtctctgaagaactggaaggtgaacagctgacaggagggctgggtatggatccctaagctgtgttttgccacagaacacaactgggttctcagaccacttaagaagttgccatggtagacttcagagttctagcttagctatcaattaacagctactatttattgaatgccagccataatccaggtcctatatgaggtaccttatttatattatctctaatcctgacaaccctacggtagcaggattatccctgttttacagaagactgaaaagcagagttaaagtcaaatcattctgcaaagctgcccaatacataattgatggagctggaatgtgaagctatgtgtgcttggctgcaaagccacatccactgtactatgtcaccggagtgagacagcacatctcaacagctgagcctcaggattctcacctgtgaaaataaggaagctggagccctgacagctcaagaccctttgagtgttaacacttcgtgatgcttctcctttagcccaagtactgaatgttaaatagcacaattctcctccttcatatacttcacagtgttcaattccccagcagtctctgttcttttaaacaaagaacccagaacacactttggaactgtaaggtgctactcgaacatgtcccacctcagatgcttagaggccatggacatcatacgttcttcccaaagccaaggctgtttttctacctttcaatttttggaagtttcaagtgaaagtcaaaatctgccctggctgtaggtagaagagtacccagctgggaggtggtaaagctgaggtctgaaccagtcatcccactgtcctgaggagccagagtgaattgagctgaaatcctcaggttaggggagatcacctagaggcctacatacgctgaggctatgcctaaggacaacctccaaaactcatcttccaaaacattactgaggggttctgagggcttgggcagatacaaagtgcatggaaccctgatggtcagttcagtgggtcaacccagatccacacagagaccttttgagtcagcagagaacatatgagttttttaaaaaagataatcagttgagattttctctttcaagacctggatccatattccttctctgccatttaccatctgtgtcacccaaggccagttacttcatgactctgagcctcagtttcctcacttgtacattgctaataatatcttatggggttatgagaattaaattatgtacagatgtcttgcatgatgcctggctcacagaaggtagccagtaagtgttcatttctttccctccccaatttgagaccaccaagggcaaatgcagacagacccctttttctcctatgcctagcaatatggacctgcttctcagcccagaatgaaacagatttctgtaagtgaaaaagaaaggtcctaaaatgacctttatttatctatccaaatagaaatcaactttttttttttttttttaagagacagagtcttactctgtcacccaggctggagtgcagtggcacaatcattgctcactgtagtctgacctcccaggctcaagagatcctcctgcctcagcctcctgagtagctgggactacaggtgcacaccaccatgcctggctaattttttattttttgtagagacagggtctccctatgttgcccaggctggtcttaaactcctggactcaggtgatcctccagccttggcctcccaaagtgctgggattacaggaaggagccaccaagcccagctgaaatcaattgattctaatagatttctaataattaggaaatagttactgtgcatctaggatgtgtaagaacaagcaggcaaggtgctgtgctgagagaagccaagtgagataagatagaggcccagccctcacttacatccaaattcttcagacaaaaatgtttacaggtaaattctcaaccttatggggtaaaagaaccagtcattattgcagtggatttacacatgttaaagcataagccctcccatgtcctgaggaaggcctggctggatggtcatcccttaacctcccagtgaacagccagttgtagagaagcttctttcagcccctagcctctgaattgagtgggctgaaggagagaatgggaagctccctccaccacagcctgagggcacctggagagcaccacaactggggatgccaacttttccccagggcccagaagggcagatatgacaggggcctagagagactctgttccataagagctcagtcaaaaatccctttattactcctccttcctgcagatcctatagactgaaacagtctgccaattaagctgtaattattatggaatatgttattgttgttttaaaaaattaaccaaacacataatgaagcctacgaacagcaagaaataagtgttgctagagtgcactgattcagttccaaccaaaaaccaggaagactgtagtttcaagtattttgtgtagttgtactgcagttaaagacagggcctccattatttggcaaataatggaaaagagcttgtgtgcctctgaggagccacataagttgcagagctgggaaccattcacctgatccaagtccttcatttttcagataaggaaaagagtcccagaggacctaaggcacctgccaaaggttactgtgaagctgggcagagttatgcataattttttccctttaaacatggattgctttggaacacaaaggttcatttgttttcttcaagagataatgtgtaaacccaagctcattaaatcagtattggacattaagtgaaattctataaaaagaaaaatgctttaaagatgtccgacaaaagccactccctaatttacctcttttgtaaattccaatttgaggtattttcttacttggaagcacagtggtaattgcagctcacttctcacgctagtgtggtaggaaagacagtgcattctctgctgagtatgtatggcctgtcaggcaggggtgtatgggacacagaagttgtattcttcattcccttgctccctcttcctccctcacatgtcacgcctgatcatgtccccatggaatctggttgcgtcactttccttgcaaccacagccccagaactcccatagactttgtactcccccagaggcctagggtcaagaacttaatttgtttcacagaatccagcaaggaccctgttcaggagcccaagaagtctagcttctactttctgccaaggatgaaactgaggcccaaagaggagcccttgaggatatcctataataaaagagggaggggctaatggcagaaacagctttctgaccaggtagtgatgtggtaacggatacctgggagagcagagggtctgggtggtccctccctggggggaaagagccctgtgtggcagctatctcttcagaagtgacttcaggaatgtggcctcttatttggggaagggaagaatgtctacgaaagtcagtcagtaccccccagactctagctgggcaaacggagcttgggggtaggggcaagaagatcaggttctccagaaagcctgggacagaacaagacaaacggcaggtggacttgggtggcattagtggtctggcccttaaaggttcaggttgagagttcactatctgctctagcttctcctcttcctgagaagttgtgtcctccctggcttccctgcctctccaagggtaaaaggggtatagttcctggctcctaaaggaacaacccttctcctaagctgccttcccaggattaagagaaattaatgaggacctgaaatgtggctacttcaacacttggcatcttaattccacatgtaaaagctttctcctaaactcaagatcaatttccattggctctttagaaaacaatctcagccacaccttcaacaagtcaggcaaactatccctttttttactctctgctaggagaggaaaacaaacctgagaatttcctctccactaggagaagaaaacaaacctgcagccccctgaaggatgagagaaagtcaggaagacagaaaaagctgcccagtgaggctccatatgttaactctgttgaaactggttgcctcatctgtaaaatggggatatataatctctttaggctgttgagagattaaaggataaagtgtctagcagggcgcttggtagagtcagcattgaggaccagttcccttcccccttccccctgtccagacacttcccagcaatctaccagggtccggtcattccacaaaaccacatggtgcactgcttttctgcccagggcctggccacctgactagtatcccggcagcaagatctgggcactggacctagcttagagaagccagaagggaaaagtcgaccaggaccactggtgagggggaggcagcctttttggaacaacaggctgctcccaaagaatgaaaacaaaccccaccctagcctggaatggctccattcagaagggacccagagggccagaaaccccctggggagtttctatgggaggtggagtggggcaatgagcaaagaaagccaggttagaggtagagtttccacatctccctctgagaagccccacagagagaggctcgtggaggtacttaggcctagggactgaggaggtgtgggggctggcccagcagctcaggaacactctaaagcccattgctccagtcttagaagcactcgcccaggtctttccccagcaactacattcacctgggagctcagaagcccttcaaggccagaggcaaatgtgcctgccattaagagaacaaacgtttataaggtgcctactgtgtaccaggctacccacacccaggacttgccagtttccacagtttggcaaaacctgcccatcctgcttgttgggacaaattcctgggcaggcagcatggcccgcaggtaagacatgtgagagctggaaacagcactctatttgggctattccccccggaagcagtaacatctacaatgggcaggtcagtggcatcttttggaggctccttcaggtttgtctgggatagaaggggagctggagctccctaagaagttccttctgggtatatccctcccctcaccacttccaggacataatgggggtacctcacaaggccgattctccttgggtataacctccgctggcttctgcccggcagaaccgatggtaaaggactaagtgagaaggagatttagggagaccaccctcctctcaggaccaggggccaggagagatggagaggggaactcggagaccaactcaccgaaacaggtctctggaggtgaagtaagccgggactgacaagtaactccccatcttcttcccacaccagatagacaggctcagctgcaaatccgtctgtgactgcctcaggccggctgtagatggccaccatgacaggcccggggctcccggcacctctggctgcaggcaggctgccctgagctcacctctccctccggagcagctgcgggagcctgaggactccaggccacttggcccccagcagattcccacaggggctcatggctgggatggctcctccctagttctcagaagctcaggcggcccctctggactccgagaaaacgacctctctgtggaggctacacacacactggcattcttgagcaggggccggtgactagctaagaaagaagcgctgctgtcaagttagccttcttcttcagtcccacccctgaatgagggagggagggaggaagaggaggggctcccgcagaaccgaggtgtgtggttggagcagctgttaggaaacagaccttgcaggcaaggggtggagctgggctggatcgaggctgcaggcaggcgctgcagacaataactgggaccaattgagcgtccatcctgagctcagggaagggcaaggcaggatagagtgtgaacatatctggccccagatgtcctcaagcagaggagctgcctacaggacagtaattctgcttggaggtggaaaaaaaaaaaaagcagaggatgccaggtccaggaagagccacaccagacggggggacctctggtaggagagacaggtccagagagccatcctagctctgagctgccatctgttctgtcctggcactagggctcccattcattccctccctctgcctgtcctggggacagcctcaagagctgaccaatgggaggtgccacttccactccagggcagggctgtgttgcaaataaggaaacaaggcccagagtattaacctacacctgatgtgtctccatgtggcaaacactatatgcactcttttatttctctgagacaggaattattcccactctacagacaagaaaagtgaggtacagagagattaggtaactcactcaaggtcaaaaagggagtcagtggcagggctggaatttaaatgtaggctcatgtgactctagagctggagctctcccactaccaggcttcattctggctctttaaggagaaaaatcttttccaaagctctctgcaaataggatggagcccaggttactctcattcactcactattcactgagtgttcacatgcagaacaccatccattggcctcagtggacagtggagcttcttctacttgtcctgtgataaccatgcttttcaaactgaaaaatggggcatgagggagaaaaaggcctggggtgccaaaagggattgataagcctaggtatctggaatgggagcccacctgaacagcccccagttgtgacgatgaccaaaccagagcctaccatgtagaaagcccttgtctccctgcctgcaggattgtaaaggaaaaagcaaggctgctggaggaaaccagaacactcagatctcactactggatttggggcagtgacatcagctctcccttaccaggcacacaccgctcaccattgtaaagagccagaagtcaccgtgcagcttctatctcttactgtgaaccatggcaggaaagtctgataaagatggtagatggggttacaagggagccttttcccattccaccaactggacacagggacaacaatgcatgtgataagagcacatgggtttgaatactgttaagaagctaccatttattgagcagttaatatcttctaggccctgtgttaagtgcttagcatttattatccatcatgtttaaattgccagtaaaaggaggaaacgtcatcagcctcatttaacagattaggaaataggttctgaggggttatgtcactattctcaagacaaatagctgataagtggtgagggtgttttttttttttgtttttttttttttgagtcagggtctctctctgtcactcaggctggagtgcggtgatgccatcatggctcactacaatcttgacctcgaccttctggactcaagtgatcctctcacctcagcctccagagtagctgggactacagatgcgtgccatcacacccagctgtgaggctgagtttcaaacctggtacatatggctctagagcacaggtcaaggcactttttctgtaaagggccagagagcaaatatcttaggctctgcaggccatacagactgtcgtggccactcaattgtgtcattatagggcaaaagcagccatatataaaacataaactaagggacatggctatgttccaacagatatttacttatggaaagatttttttcttttttttttttttcttttgagattcagtctcacactgttgccctggctaaagtgcagtggtataaacatggttcattgtagtctcaaccacctaagctcaagtgatcctcctacctaagcctccagtgcatcctgggaccacacgtgctggccaccatacccagcgtgtgtgtgtgtgtgtgtgtgtgtgtgtgtgtgcgtgcgtgcgtgtgtcggagtctcgctctgttgcccaggctgcagtgtagtgtcgcgatcttggctcactgcaacctccgcctcccaggttcaagcaattctcttgtctcagcctcccaagtagctgggactacaggcgcatgccaccatgctcggctaatttttgtgtttttagtacagacagggtttcaccatattggtcaggctggtcttgaactcctgacctcaggtgatccacttgcctcggcctcccaaagtgctgagattataggtgtgagccactgcgcccggccctggcttatttttttttattttttgtagagacagggtctcactttgttgcccaggctgggacactgatatttgagtttcatgtaatttccacatgtcacaaagcattcttttgctttttttcccctaaccattaaaaatcacaggtcatataggccaggcatagtggctcatgcctataatcccagcattcgagaggccaaggagggaggactgcttgaagccagaagtttgagaccagcctgggtaacaaaccaagaccctatctctactaaaaaaatcagtcaatcaggccagtcatggtggctcacgcctgtaatcccagcactttggaaggctgaggcgggcagatcacctgaggttggaagttcgagactagcctgaccaacatggagaaaccctgtctctactaaaaatacaaaaattagccaggcgtggtggcacatgcctgtaatcccagctactcgagaggctgagacaggagaatcgcttgaacccaggaggcagaggttgcggtgagctgagttcgtgccattgcattccagcctgggcaacaagagtgaaactctgtctcaaaaagaaaaaaaaaatcaatcaatcacaggccgtattaaaataggcaatgggccatagcttgccggcctctgttctagaaccacagagctcaaccactctgtttactacctctaatagtgaagaacagctcttggtgtttgtgcagagctcagccatatctatctatctataccacgaagacaccacactctagccccagaggcagccagaagaaggaagcactgaacaggtgctcaccctgtattaaacattgcttgcagcactacttgtatgaatgaattttaacccccactattccacagtgctgtgatttttctctttacagataaagcaactgaggtacagggaggttaaatcacttgcctgaggtcactcagctgtaaatgtgagaagtgaagccaggatttgaacccagactagacattatagacaacgttctaccatgctataccaaagctcagcctgggcccagagccagactgtctgggtttgaatgcgacaatgcactgcatgtaagcccttggcacaaagtctgggacacattaaaggttgataaatgttagccattaatatcattaagactattgttacaactactgtgggctagctatgtggcctttagcaagtcactctctctgtctgggccttggttaggtctctaaatagctcccagcatcaacatttttcacccctatgaggttgcagagggctctctattttccttgggtctcaagttgagtttaaactcttgagcaggaggtcaggatcctagccgaggggacacacaagggccacagaggaggtgaggtgggctggaagtggggaaataacatacgggatactgaaagggctgcccagctggagagctgggagcaatctttctcccagccacacagacaactatttctcaccaaaaatctattatgttcccctgtaattcaatcaggcaagaagggggccccaaattaagtctgggactagcaaattatcttttaattgtaccctctgatttccatgtgatgaacacagtactaatggaagaatatgcaagccacaaagagactgaggccagggagcctatgagcataactcctcttgacatttcacacagctctgctgttccagcggcgacgggctcagtgagtcggtgtctaggaatgtgagcaggaggctgcaggcgctctcctctccccctactcctcttacaaaggacttggtgggtgggtggggaataagtgagaggacatctcaatgccatgaaaactgcctccccctggaagaggaacagccttctccccatgtcctgagttgaagcagaagcccctcccaggtggaatccatttgacctccaaaaattcagacttcaggaggaacctttgaaggattgatcaccagatgtgataagctgctggctgctcagacccaagtgtgtggttcctcagagccaacttcaaagggcccaagccacccatcactgggagatgaaatgtcacactggaggatatatttcaccctcccacccttggaaactggtcctggatagaaaactgctcttctaggtcctcagagcagctggcagaacattcatcagttatggctgccagaggcaactgcaggaatcctttgactggcaattatagtagggataaaatggcaggagaggtgttaatctccagcacatttcataagttggaaacctggcacggagctgaacaaactgactccttagaaccagctgaggcacaggtcttcaaagcgtctgtgacaggctggagaacaatagccttcataaccggcagccccaagtgaatgttcaggcaaggtgtggtaagtgaatgaatcaccccaaccttttgtcggaagaaagctctggtcaaacaattcaaaacccaagaaactgtttgtgtgaagccctctattggctgggaggactccaatcaaggaagagaatttttgaggactccgaagcctccaaatactgaaaggtaagcattaccacccccatctactaaccatctttcgtgccccactcctcccctcttccaaatcactttctacattatagcagcagtcatccttctaaaacaagggtcccgggcaggcatggtggctcatgcctgtaatcccagcactttgggaggctgaggcaggcagatcacttgaggtcaagtgttcgtgaccaacctggccaacatggagaaactccatctctgctaaaaatacaaaattagctggatgtggtggtgtgtgcccgtaatcccagctactgcggaggctgaggcaagagaatcgcttgaacccgggaggcggaggttgcggtgagccaagatcatgccattgcacaccagcctaggtgacagagccagactccgtctcaataaataaataaataaaatgtcccagcaattcccagcttcacagggttatgagcattaaatgagaacatatgtgaacaagctcacttcagtatctggctcatggaactcagtcagtgttttacagagtgagagtttagtatctgctactcctgtaatgtgatgtcatgttcacaaacaccaggtaaaagacaatatttggcatctatcttaggtatcatggaaagagaaaagaatttggcatctggatagaactttagagatttagtctaatcctttgttttacagttcatgaacttgaaactaggaatggagaattggaagcccaagacatatgaggataccaagtcacatgaaatgtgttcagattttcagactgggagaattatttcccaatatattgaaaaaagaaaatatgttggcacagtgatggaaccattgttagtaactttggagaaactggagaatgggtgcaatatctccaaagtgtaatgttccatatctactatataccaggcgctggggatgtattcatgaaataaaaatggagatagctaactggcccagttttcaaaaaggaggaaaaacatactggaaaaaggaagccttatgatccttttgctttgattccttcacataaattctaggcagatgatggaataagtggacagtaagcacttagaaaaggagctgatcatcaggagtcagcagtagtgaaatagtagtgactagttagacttgacttcatgttttcactgggttactcatcatgagaccttatcttggatttccacaggcatttgataaactctttcctgatatccagacagtaagaatgtgggcaggaaatctagaaaaatcagatacaagaactcaacatacccagcaatttgaggctctaaactgtagaggcaggattcctgaataccttgctagagctcacattgaggaaagggcatgggatttgagctcagaaaacttttcttttaatttcagtgctgcccttcccagcagcataaacttggataaattatttaacatctctgggcttcccttgtcctgcttgtgctatattcctcaagaggttgttgcaggaactgaactagatgatgagtacaaaagccctctgtaaactgaagatgcattataaacattagttattatcactgttctagtgctatagttgctcatcatgggggtcctgaatcataggtttctttactaggcatctgtggacacctggtatgggccaggcctatgctgggcactgacagtacctagtgcctgccttcacgtagtttgatctggtgatagacagatatggccacagggtccttcctgggtgtgatgtgcttggagacacattgaaggaacccttcccagaggagaatgaatgctgtgtcagagcagggcctggaaaaaggaggagaagacagcacctgcaggagatgtaggaggctgtaaaaggagttaagagagcaaaggtttgggggactcccagggagccttatgtggtgagtcatcaatggagtacagcaggaggtgaccagagccgttcctgagggaactaaggttcacagagaaggttgctgtttaaggtcacaggtctaggaactgacaaagctggagtttgacccaagtctttggactccaggtccaacatactaaaactgcctcaaataactattttattcttgccatttgatttacagtaatatttctgaaagtgtaactaaaggaatagcagcattggaccctctggtcagcttgttgaaaatcaagattcctgagtcccacttcagatatacagaatcagaatcgctgagactggggctaagaatctgcattttaaacaagccccagtgtttctgatccacactaacaattgaaaaccaatgcttttctttttcctaagtgcttttccacttgatttcattttattctcacaataaccctcagaggcaggcaggatagatcactatcattaccttgttacaaacgagaaaatgaatgtacagatagcttgttcatcttcttatcctgaacgtagcttaataaataaatgtttggtgattgacattttgttaagccttggctaagtagagactttcaccttcctggtgccactcttacccatttgtaaccccacagtagctgcctctctctttccttggtgacgcggcagtggtgctcacgttatggtataaaaaggtgattctaggccaggcgcggtgactcacacctgtaatcccagcactttgggaggctgaagcaggcagatcacaaagtcaggagatcgagaccatcctggccaacacggtgaaaccccgtctctactaaaacacataaaattagccaggagtgggggtgtgcgcctgtagtaacagctcctcgggaggctgaggcaggggaatcacttgaacccggaaggtggagattgcagtgagctgagattgtgccactgcactccagcctggcgacacagcgagactccaactcaaaaaaaaaaaaaaagtgattctagaagatagcgtcattccatgaaagtgctatctctggaactaaaacaaatttcaaacaaacaaacgtgagggatgacattagccaacttcagaaacggtgcttctgcaagagtcagtgctactgatggcagtggagcaccctctgatctcagcaaaatctctatagggcatcatcaggaagtcatgaccagaatacagctgacacacaaaagaaaacaaccttaactcaagtctggcatgagatgctgagggttttttttgtaatcgtaagcagtatggagaaagaatttgttagcacacttccagcactgcccatgggagaagggactctagcttttgggggaaaaatgaaaaacacggcaaaataagcacagcaggttgctacagttgcagaaggcatgccattccttgaggccctggttttgatggtttaagacttagggatgacatttacagactgaggtcttagtctacataagtttgagcttatcttatcacctcaaaagataagctcttgcctaaaagaatattgtagagcgaagagatggtaatggtgcatactggatggactttattcaagtgtccaaagagtcgttcaacaaatacatcattcacccagcaaacactctgagcacccactacattctaggcactttgctaagctctgggatacaaagacaaactagatacggctccacacttggagaatttcacactctaagagtgatgctagatgtgtaaacaaatactgaaatggatataactgaggtatgaagagaataacgaagagaataacaaagagagaagaagtctctgattggtggggagaggtatgggtggatttggcggggggctcctccacagaagatgggatggtattggcagactctaataggctgattgccaggcagtaacaggcattctggcctgaaggaacaacatgtgcaaatgcactgaggcataaagagtatggtatgctcatataacgctgagcaggtctgtaagctctagtgcatggcacatatgggcagcaattagacaggaggccagaatggtggaagagagtaggggcagagcactaaagaccaagtctgctaggctaaagagttgcctacaggcagtgaagagctatcagaggtatttaagcaagcagtgatttttaacagaacgcaaagctgaaatgccaaagagaatgctgatctttagttgccagtttggctctctgaatgggtataaatgcctaaagtctacagttggccgtgtatatgcccatgtgaaatttgctggccaactagtgttcactaacagcagagtatgcctttgtcctggggccacatctctactgccttgtcattttaacagctgatatttgtctatatgggctgtaagcacataagcatggaattgcaaccccttatagataatcatccactgttgctccatgatactaattagaaaattgaatgtctaacattgagtaacaaatgctgtgttgacagggacatccttctccaggctgcactgggaaaaatgcttcggatatctcaagaaatctctaggcaattcaaggaaaaaagccctcgtctggcagggaacacctgaaaaatcaccctggttaacagaaaatctgcgtgtgatcttaggcaagccattaaatctctctgggcttcaacttcttcctctgtaaaaggaaggagttaggtgagcaaaaaattccatacccattacaggtcaatgcttaaagaagcaacgaggaaggaggtgtgatcaaaggaaggttgactggtggaccacccagagaactcttcaaggctgatgttttcttggtgaatgaccctaatctaggcctagcttttggcctttcaggtttttgaccttcctaatgtccaaagaggtgtagacattctgtgatggttctgacctaaccatttatcaaaccctctgtacacttatgaattgactattaaaatcagaacactcatatcccctatacaggtactacttccagacccttcctgttattaagtatcccaggaagctgaattaggcatcagaaggttgctctgtgagcatggacttaaaataaagggaaatgagtagccactgaaagaaatttcatcctggcagtggtgagtcagccaaactagcccaggttgccacaaaggaccctattctggtgaccaaatctagattcagcatctttatctgaatacagtactagttttgcttcactaacttttcactttctgtttcattgctggccacttatttattatattggttttggttttttttttttttttttgagacagtgtctccctctgtcacccaggctgaagtgcagtggcacaaactcggctcactacaacctccacctcctgggttcaagcaattctcctgcctcggcctcccaagtagctgggattacagggacctgccatcatgcctggctaatttttgtacttttttttttttttagcagagacagggtttcaccatgttggccaggctagtctcgaactcctgacctcaaatgatctgcccacctcggcctcccaaagtgctgggattacaggtgtgagccactgcgctcggccttatattggtttttaaactaagttttaattgaaaaaaataactacttctttagatatgtgcgacaatcaccaattcacacatattattcagccctggcagacatttgcctctctagtaactaataacaaagaacaaacattcatgagtgctctgtgaatagtgttcccagtgctacacacacttttattcacagtaatactgtgagggtaggttgtaaggaggtaggtagtaagtttgtatctccatttcttctttttttttttttttgagacggaatctcactctactggagggcagtggcgcgatctcagcacactgcaacctccatctcccaggttcaagctattctcctgccttagtctcctaagtagctgggattacaggtgcctgccatcgtgcctggctaatttttgtaattttagtagagacaaggtttcaccatgttggccaggctggtctggaactcctgacctcaggtgatccgcccgcctcgacctcccaaagtgctgggattacaggcgcgagccaccgcgcccaacctccatttttttttttttttttgagacagagtcttgctctgtcgcccaggctggactgcagtggcgcgatctcagctcactgcaagctccgcctcccgggttcacgccattctcctgcctcagcctcctgagtagcagggactacaggtgcctgccaccatgcctggctaattttgtgtatttttagtagagacgcggtttcactgtgttagccaggatggtctcgatctcctgaccttgtgatccgcccccctcggcctcccaaagtgctgggattacatgcgtgagccaccgtgcctgctggcctccatatttttttattttattttattttattttattttattttatgtttatttatttattgagacagagtctcgctctgtctcccaggctggagtgcagtgacatgatgttggcccactgcaacctccgcctcctgggttcaagcgattctcgtgcctcagcctccaagtgagtagctgggactacaggagcatgccaccatgcctggctaatttttgtattttcagttgagatggggtttcaccatgttggccaggctagtctcgatctcctgacctcaagtgatccacctgccttggcctcccaaagtgctgggattactggcgtgagcaaacgcgcctggctcgtttctttttttttttttttttgagatagggtcttgctctgtcatccaggctggcatgtagtggtgcagtcatggttcactgcagcctcaacctcctgggctcaagcaatcctctcgcctcagcctcctgagtagctgggaccacaggcatgagccaccatgcctggctaaatttttgattttttgtggggatgaggtcttgctctgttacccagactgatcttgaaactcctgagttcaagcaatcctcccgcctaggcctcccaaagtgctgatattataagtgtaagccctgcacccagcctgtatctccagtttgttttttttttttttttttagactgagtctagctcttgtcacccaggctggagtgcagtggtgcaatcctggctcactacaacctctgccttccaggttcaagtgtttctcccgcctcaggctcctgggtagctgggattacaggcacccgccatcatgcctggctaatttttgtatttttgtagagacagggtttcaccatgttggccaggctggtcttgaacttctcacctcaggtgatctgcccacctcggcctcccaaagtgctgggattataggcatgagccactacgcctggcctctccattttctagatgagaaaaatgaagcacacaaagggcaagtaacttgcccaaagtacacagataataaaaggcagaaccaggatttgaaactaagcaatctggttctagagtgtgctcttaactacaacacaatactgctttcattacttgtggatctaattagttcaactcacagaggacaaacttcatttccaacttcttgggggaactgccaacctatccaccccactccccatcataaatcacctataagtaaaagatactatgcaagtattccattttttccactctatattgaatatatatctttagttaatgccatctttcaaatatacaatttaagaaaacaaaatgaaacaaaacaaacttacgattggaattgaaatttttcagatttcagggcaattcataatcagtttggtggctagagtagctgaactcattcttcctctcttgccctcctctccggaggtacctagggcttgttcctgcctggattgtagctacagagaagtgcagctcaagacctgctgctggaaagaaggactcctggggtcagcttctctggcttctactcactatgggatagctcctctgagggcaaaagacaaagctttaacttatcaccctgacacttgcaggcaattttctaaaacaacccaatgtccggaactgattccgtcttgccatttacagtaactgcagccacggtggctgctataggaaggatgtggggaaggggaaggggaagggcagggaaaagcctgacttacatcatatctcttggccacctctagcaattcattcaacaaatatccctcctatgccaacaatatgctcagtgctgacacaatgaggggcaaaaaccccacagtccatgaccaaattgttctattagaggtcttaagatatcattaaggagatgatcacatgaataaatgtgagattaaaactacttttttaaaaaaagcctcaaaggaaaggtctatgaaaacataaaacagggacctaacctatttttcagggtgaggaattacttctatatttctctgagccatccaggtaaagatctaaacgataagcaggagttaagtgaacagagtaagggggcattctaggcagagggagcagaatgaacaaagcccttgtcagaaggagggcctgtccagaagagaggtgaggctgaagtgcagggagcaggaggttgtggagatgtggagagaggccacattacggagggctctactgtaggccaaattaaggaatttttttttttttttttttttttgagatggagtcttactctgtcaccaggctggagtgcagtggcgtgatctgggctcactgcaacctctgcctcccaggttcaagtgattctcctgcctcagcctcccaagtagctgggactacaggcacacgccaccacgaccagctaatttttgtatttttagtagagatggggtttcaccatgttggccaggatggtctcaatctcttgacttcatgatctgcctgcctcggcctcccaaagtgctgagatgataggtgtgagccaccgcgcctggccaagttaaggattttggtctttatccaagaacactgggaagttgtggaagtatacaaggtaggagagacaacacagagtgacacagtcaagtttttttttgttttttttttttttaagatcactccttccagccaggtgcagtggctcacacctgtaatcccagcactttgggaggccgaggcaggtggatcacttgaggtcaggagttcgagactagcttggccaacatggcaaaaccccatctctactaaaaatataaaaattagctgggtatgggggccggtgccttaatcccagctacttgggaggctgaggcaggagaattgcttaaacccgggaggcagaagttgcagtgagccgaaattgtgccactgcactccagcctggggaacagagtgagactctgtctaaaacaaaacaaaacaaacaacaaaaatcactccttccaactgctctatagagaacagattagggggtgcagagtggctgtgggagatgaggctattgcagacatccaggtgagatgatggtagcttggagcagggtggtggtgggagaaaaggaaagaagtaaacctaccaaaatataatttagagataaaactgataggcttggatatgcaggatgagagagaacaggtatcaaggattcctaggtttctggcttaggcactgggtggatggtggtgcctctcaatgacatacatgtttcagtggaagaggagccagttttagggggaagagtgaaagtccagcaaagtctagagaagagagtctgaagtgcctggaagacattcaaatggacaagccaggttgatagtacaacatatgggtctagaactcagtggaaaggtttaggctggagatactgattttagggtcatcagtgtgtggaggacaatggaaggaagtcatgagtgtgtgtaagactgcctaaggagaaaacagcacgcctgaaggaatggtaacatcccagagctggacaaagaaggataagcaaacaggtattaccagagaggtaagagaaaaccaggagagtgtggaatgtcatgaaagccaagggaagagaacatttcaagactgacagatactaataataaatgctaacatctgttaagtcccagtcatggccagacattctgctcaggactttgaatacatgattgaatttaatgttaacaactttttgaggtgggagccatttcccttttcatagacaaggaaactgtggcaaagaatggttaagcagctgactcatggtcaggtggctggtaagtgaagctggcatttaagctcaagcagcctgactccgaactttatccacttttctctaatacaacccttagtgcagtttgggaggtcatataagatgaagcctgaagagtggtcggtagacagactgatgaagctgttattcggaatattactaaaggaatgttgtttcaggggagaaacagaatgaaagccaggctggagcccatggttaggaatgctccatgacattctctatttccagctgtcttagggaaccagttaagagaccaggccaggtgccgtggctcatacctgtaatcccaacactttgtgaggcccaggtgggaggatctcgagcccaggagtttgagaccagcctgggcaacagagcaagaccctgtctctacaaaaaattaaaaaaaaattagctgggcatggtagtgtgtgcctgtagtcccagctactcaggaggattgtttaagcctgggagattgaggctatagtaagctatcatcatgccactgcactccagcctgggcaatagagcaagacctatctcaaaaataaataagctaattaatgaattaattaagaggccaggctagtatgccaactccgtatcccccacagtgcctaatttgatgacttttatatatagcaaatgacgcttgatatatttggatagttaatataagatgcacaatgttgccatgtgctgctgctaatccttcacattaaaccattctaatgttttcagagtccttgatcatcacaactactccatgagatggatttcttttatgacattttacagataagaaactgaggctcacaggggctaaggaacttgcccacagttacacagttagcctagctcaactaagactcaaatcagattttctgtctccaagtctactgttttttttttttttttctcctgggagtcctagtggaaagcagactctcttgggagccagggagacctgagttcaaatatcatctgtgtgaccctggacaagttactccaaacctttctgggccttcctgttttagtataaaatgggggttgcactggccaggcacagtggcttacttccgtaatcccaagcactttgggaggctggggcaggaggatcgctggagttcaagaccagcctgggcaacatagtattaataagaccttgtttctacttaaaataaaaaaaaatggcaaggtgtggtggcacgcctgtagtccaagctgcttgcaaggctgaggtgggaggattgcttgagctcaggaggttgacactgcagtgaactatgattgtaccagtgcactgtagcctggacaacagagcaagaccctgtctcaaaaaaaggtgggggttgcagggttattatgaagattgaatcagataatctaagtgaggttcttaatacaacgtttaattaatatcagttatctatctctggcctcatctctctccatttttctacctctgcctcctatagaagctgtgaaacatctgtgggtccttagttctctcttctcaaagtaaagagcaggattaaggcacattcaagctcatatgctgctgctacatcctaggagtaccactctgtggtcaggctggagtctcttgtaggggcagaggaagaaccagatgtctgcccttccttcctctgtcaggcaggccccagccccctgtccaatagccagccttaatgatctacgggctggctgtttcctaaaagataaactggacaaatgagtaaacaccttctggagaaggccacagccagaatcaaaggtttaggttagtaagtgtggcagcaacatcaacagcataacagcagatggcagggttgctccactgactctacatcaggagcctgagacccagaagaaagttaacagcacttttgttgacattatagagtccatgaagcctttaaactaacacccttcaatgttatctgacactaccagtgtgtggcaggcagggtgagggctctttaccccatattatataagaggaaactgagcctcagtgaggttaagaaatatgcttgcattcaagaatgccaagagactcttgcaggcaaggagtaagaatgcctgagttcaaatctcagctatgctacctattagctctgtgactttaaacaagtaacctccatttccctattctcgaagtaggtaagactagtactacattttattaagtcattgtaaggattaaatgtgctatgcatgtcgtatgctcaggagggtgtctggcacagagtactcaataagtggtacctattactgtaattatgattctaccaggcttgcttagatggggatgaggggagagaaaatgaatgtggctttcagcatcacagaaagtaccctgctgtcagccaacatattacaacacagtctctggttgctacgtgtgttatttcttcactggccttcctggagtcactaaatttagcggaaatggtctgttgcctgatgcagtgaccacagtcttctatctgcattagccctttcccagagtataggtattagtaaccgcttttcaaaagtgaaagctcaaatagtcttatgtttgcaatcctgagaaaggaagtcctgaaagttcccaggagccttaagagcggtggattttccttctgataatgctgctaggaaccaggtcaagcaatagagacccacgctggggccatcaagactaataggggtagcttttcttccctcctcctaagccaaacacctttgatcagggtgaacggacaatcatcaaaaaagttgtcaaggtcctctggcttgctaacatgccaagaggccaggtcaccattgatagctccacactttaacctcagctacaaatgacatgctctctggctactctcctggcctctcctaaggagagagagccaggtccagagaacatcagaaaggattgccccagatacagaattaatggcactgctcaaggaaaggaaagagaggtaactcagagttttaaaaaaggcctactgggctggtccaagtacaatagtgtttacaagtaattgatcactaccagttaccgatttctttgttccttttccactcccacaatttcacttcactagcctaaaaaaaaaaaaaaaaagaaagaaagaaagaaagaaaaaaaagaaaagaaaaaaaggaaaaaaaagaggcctgttgggaaggcttgggaggactagtcagccatatgtccaggagatccaaaagattctggccagctgcctaatcgcaccagcacaattactgacagagctactttcagttttgtcactggcctccattgcacagtctgaggttccagctttaagtagcttcctgttgtcctgggcacctgagggtctgtcggaaggctaacagaggcaggattatggatgtggctgcagacagaagaatggggtaatgtaagggagagatgaggggaggagtttaggatggaccccagcaatttctccattcaatatccagccccaccctgtgactaggaaaacaaaggtactgggggaaggggagaagaaaagtcatttcctttattgtaactgtagcccagctgggtaagagcaaggctggaagggggccttgaagaatgaatttctctgagtagcacagagggagagtcctcctcccagcaggcctgcactactcaggtactctaaattcatcagagaaacactggcaagctggcgtgggagagatcttacaagaccattcaggttgatgccccatgttcctcaaaacccaggttatctctggggtcagacaaatacaatccttcctagccctgaagattttcctccaactggggcaaaagtcaaattagatccaaaagacagtcactctccccagggcaaattaccaggctctatctgagggcgccgtgacatccagtttgaatttaccaggggaaagctcagaagtcaggagatgtgctccttcagcacagctggattagagtctctgtcctcaaggtaaagctgcaactaggagacagaacctagatactctacttcctccacgggaatgatatttggcttgattgtgtcagggtagttcaaagttgcccttaatccctggggctccacatcagatcaccaatgaatgtgtaataagagaaatgtatacatataggtgtatatagacacacactcacaacataatataaagtgacagttactgattattaagggttttttttttcatttgttttgttttgagacaggggtttcactctgtcccccagctggatggagtacagtggcatgatcacagctcactacagccttgatatccctgggctcaggtaatcatcgctcctcagcttcccaagtagctgggactacaggtgtgtgccatcacgcctggctaatatttttgtattttttgtagaggtggagttttgccatgttggccaggctggtctcaaactcctgggctcatgggctcaagcgatccttctgcctcggcctcccagagtgctaggattacaggcataagccaccacgtccggccctattaagagttttctatatgtcagatgctatgctagccactttatataggttatcacatttaatcctccctaacaaccatgtggcatgagtaatattcttatcctcattttacagattggtgcctgaagctcagggaagtcacttaaggctagttaataaattgcaaagccaggatttaaaaccatagtctcattccatagcctgtactcttggtggtggttgtttttttgcgatggagtttccctcttgttgcccaggctagactgtaatggcacaatctcggctcactgcaacttctgcttcccggattcaagcgattctcctgcttcagcttcccaagtagctgggattacaggcatgtgccaccatgccaagctaatttttttctgtatttagtagagatggggtttcaccatgttggtcaggctggtctcgaattcctgacctcaggtgatccacctgccttggcctcccaaagtgctgggattacaggcgtgagccaccacgcctggcctgcctgtactcttatctaccatgctaacgtgtctacttcctctttatgtatttgtgtacatatgttatctttctgtctctatctcacacacacacacacacacacacacacacgcacgcacagagctaacaagctagcatctgactagacctacaaatgacccaagagttcagtgctagggccagctcttgtcatccatggcctgagcaagtctttttggtttcaggcctcatctgtgatatgaatgggttataccatatagtgggtggtttcttctagttctgaagttttttagctctaagagaatccagaaattccaaagattaacttgctctaccctgtcctgcttattttggatagaaaatattcatacacataggaaaacagcaagaatatgaacatatgggttacatgccaaggcgagacccaatctgtgaactcattgggttttgacgttacttattagtcccagctataaaatgaaaggaccagccaaaggctttaactataaggtcccttacagctctgacattctctgctcctgtcatactaaatggaacagaaaagacagaatcaacttccctgggagtaaaaggggcaagaaccaaggcaataagatccacagaaaagacttgagagctctgagttatagctgaaaggaaaggataataatgatggttgctttccaactcttccagaggccagacgtctccaggccaatcccctatatggttcccagggaagaggcaagtgtttaaaggtcaactcaattacttggtataagcacagggatgttttacaacaagagctatgtgcaggagctggaatctacagcacaaggtgcctgcctagtctatctcattctcaggatataggcacagccctaccacttcagaccttgggggccaggcatgcccatccagcctctggagtggactgctcttctttccaccaacaaatttcaactattttacgttgtgaagaatataaagacaagttcccacccttgagaattccaatccgatgggaggaaggaataaccattcactgggtgtctaccatgtactggatacactgcatatattatttcattcaatctcaacaagattattaccatccattttccagatgaagaaactgagcctcagacagcaggaacaaatctgatttgaagtctgtataatttttaagaaactgagctgcctacaaaaataatgtagctataggcagggcgcggtggctcatgcctgtaatcccaacattttgggaggccgaggcaggcggatcacctgaggtcaggagtttgagaccagcctggccaacaaggtgaaaccccgcctctactaaaaatacaaaaattagctgggcgtggtggcaggtgcctggagtcccacctactaggggggctgaagcaggagaattgcttgaactcggggggcagaggttgcagtgagccaagatcacatcactgtacaccagcctgggcgacagagcgagactctgtctcaataataataacaataataataataatgtagctataataaagctagtaacaaaaagtaggaacctagggaggcaacctgtggtgaggaagagctggctctgccaaccacactaaaaacaactcttggctgggcacagtggttcacgcctgtgattccagcactttgggaggtcgaggtgggtgcatcatttgaggtcaggagttcaagaccagcctgaccaacatgttgaaacccccgtctccactaaaatacaaaaattagctgcgcatggtggcaggtgcctgtcatctcagctactcaggaagctaaggcagaaaaatcacttgaacccagcaggcagagattgcagtgagccgagattgcaccactgcactccagcctgggcaacagcaagaatccctctcataaaataaaataaaataaaataaaataaaataaaataaaataagaatacaaacaactcttgaagtacctgcataatctgtagtgcagccacaggaaagtcactcttcctgggcctcagtttcctcacccataaagtgagggatatgggacaaccctggaaagggctcctctcatccccccaccctgcctccagctggcccatttatggctcttccaatttaacctgggttcaggggggccacacttgaggtttggtcatgagctcttccttggtacattcctttccccaccctaagattgaaattctcaactcagaagcttgtttctgtgttttccatcagaacatgaaatagtgcttggcccatagtacactggtaaagatgggaggataggcccacctaccggaagcaagagccgtgccaggtttcgttgacagtcctgtaccatatctggcttggagcaatgtggtccccacagcctggacacctccagacatcttcacctgcacacaaaaccaagaggttgagaggcccaaagtagcaggaggcaaagggacaggattcctaccatgtagaataagactgagttaacagcatctcatttgaaagggttaggccaatgctctgctagatgcacagtttctgcctccacaagatctctggtaagcacttgtccaacctctgctcatctctccagggacaaggaactcatggcctcaaaagtagtctcattccattttctaaaaatggttctgattatccttttttctactgaaacaaaacttgcctttttctagaactttcagcctttgcttatagctctgagaagaagaaacgaacacaatctccttcttttcagtgtcagcccttcctatgactattcccagccaacagccagaaacttctctctgggttaaacatgttactgccttttcctattcctcaaaagccctgttttttcagatttttccatcacctaatccaagagctcatttactcaaccaacattgaataaattggtcctctagatcagcagtcctcaacctttttggcaccaggggccaatttttccacggaccctaggctgggggttggggggcggggggatggttttggtatcaaactgttccaactcagatcatcagccattagtgagattctcataaggagcatgcaacccagatcccttgcatgtgcagttcacaatagggttcacactcctatgagaatctaatgccaccactgatctgacaggaggcagagctcaggcagcaatgctcactggcccgccgctcacctcctgctgtgcagcctggttcctaacaggctacagacccgtaccagttggcggtccaggggctggggacccctgttctagatacaaagctctttgtatgttggaggctgttagattacataatctctgctccttaagaagcaaatccactggaaaagaactgctctttcatgttgttgatttttcacttggatgttatttcagagatagaaccaagtattattttagttcagaaaaagaaaagtaatgggtataaaaggggaagaacaaatatttaatgaatgcctcctatatgccaagaactctgctaggtgctttcatagacctaatctcatttaattctcaaaataatcctgtgacacaggtattattatattcacttaatggataggaaaattaaaacttgaggcagggggcagggttgactagctaagtggtggatctagcattcatactcaggtctggctcattctaaagcttctgctctttccattctaccatgtcaactcttgttcactccaatgaggggaaccaggaaagtctttgtagaggaagctgacacttgagctgagccttgcaagatagggaagacttacctatcactggctgagaaaggagggtgaagggttgtgtgagctcagagaccagcatagacaaaagcacagagtcggtccatgttcctccaaaaagagaggcctcaaacaaaatacaatactcctggtatggctcagatgtcaacttcttgaaataaagaggacagctgagatcaagctgtggtacctgactcagccctagaaagcaggacaaggttgttacaagactcccttgtgcgctctgtgtatgcagctttgttctctctgggtaactacagactgccacaggcacagtgacagtcaccgaaccctgtttcacaggcacaggggccatgaatagacaaagcacagctcctggcacttcaagattgctcaacatcattctggagcagccaatgtacacagttgtccccctcgttccccagagaagagttaaacaagctggcaagaggccttaaaacaccacctcaacccacccattccactcttctcatgcctcagtaataggatatatatatgcccatcactcattcttcctgggtctaaaatcctcagactccttgtcaagaggggcctttttggttttagggtgacagtggtcacagagtatgccatctctctcacaaactccaaggcagaaagtctgagagactcactcaaaccaatcccaggttgggttacggacagtggacaagacaatgaattagtgagagattttaatgaacacaaacatccaaatgaatcttccaagttttggaaatatttttggaactcttacatgtaagagctttcagggtcagtttatgagctgccatgccccacccccagcacatctcattattttagagccacaccttgtttcttgtttttactttttaacccaaaattaagtctgtaacctgaccacccacttactcaacaattcaatctcttggctctgaatgatttctatttccaaaattcaaacaggatcaggactttccaccatgaggatattcaagataacttgttattgccataccctccagagcttgccctgctttctccagtcttgagaaacccaaagacattcaatcaacacatactttagtacctgctttgggttaagcatgaaagacccgaaatcaagaccctctactctctcctctcatatccacctggtttcactttccaaatgtctctctagcccttccctgtccttcaccccagccctacttcagatttttggcttcttttccctatctgctgtactcagctggctcatccacactgcaagctatctcagctctgggttagactccccagtgtccacggaacaaaggctgggctactcggtatgacacccctgttctggatcccattccatcttacttcttagaagaagtgcacttttagttatctttacagcacccctctccctcactggctcctccttatcttttaaataagttcaagtcactgccatcaaaaaaacctctggtactctcgcttcagcagcacatacattaaaattggactgagacacagaaggttagcatggcccctgcgcaaggatgacatgcaaactcgttaagttttaaaatctaatttagttttaaaatctaattttaaaaaaaaccaaaccactggatccttttctcctctagctaccatccttgtttctccccttcacagccacatgtatgaaaaagttgtcttgggaggccaaggtgggtggatcacttgaggtcaggagtttgagaccagcctggccaacatggtaaaaccccacctctactaaaactacaaaaattggctgggcatggtggtgcacgcctgtagtcccagctactcaggaagctgaggcaggagaatcgcttgaacccaggaggtggaggttgcagtaatctcgccactgcactcacgcctgggcaacagagcgagactctgtctcaaaaaaaaaaaaaaaaaaaaaaaaaaagaggctgggcacggtggctcatgcctgtaatcccagtactttgggaggctgaggcgggtggatcacctgaggtcgggaatttgagaccagccatgaccaacatggagaaaccacatctctaccaaaaatacaaaattagccaggcatggtggtgcatgcctgtaatcccagctactcaggaggctgaggcaggagaatggcttgaacccgggaggcagaggttgcagtgagctgagatctcgccattgcactccagcctgggcaagagtgaaactccaactcaaaaaaaaagaaaaaagaaaaaaagttgtctacacatcgctgccctcatttcctcacttcccactttctgcataatgcactgcaatctggcttccacccccaccatttctctgaaactgtctcaccaaggtcaacagtaacagtaactgcttattgctaaattcaatggacccgcttcagtcattctttcagcaaatatttattgcatgccaactatgcatctgacactgtgttggggaaagaggagcaaacaagagagagattaaacacaaagcaaatattaaacaataatataattatttattgagggccgggcgcagtggctcacgcctgtaatcccagcactttgggaggctgaggcaggtggatcacaaggtcaggagttcgagaccagcctggccaatatggtgaaaccttgtctctactacaaatacaaaaattagccaggcatggtggtgggcgcctgtagtcccagctactcaggaggctgaggcaagagaattgcttgaacctggtaggcggaggttgcagtgagccaagatcattccactgcattccagcttgggcgacagagcgagactctgtctcaaaaaataataattattattattatttatttataattggggcaagtggtacgaagatatcaagttcataactaggaaaagggcgggcggccaaagtattccttgaggaagtaatttccaagctgagctctaaaggatgaatacaaattaacggggcaaaaaaggggggaaggaaggctaacactggagaggggggacatgtgcaaaggccctggggcaggaacaaaaacttctcacacatcattaaagttggcttttgctacctccaaagggctagcaaaccatgtctggcccctggtctgctacaatccttcaataaacagttactgaaagagcaaatggtccttacaatgtggtcccaaaggacccttctctctcaccattccttacaaaagaatgctctagttacattttgacctattttctattcctgccacttttattcatgtacttgcatcctgacattcacacctccagttattctctatgtataagcttctctatcttttcccttaatcaaaaaaaaaatttttttttttgaaacagagttttgcttttgttgcccaggctggagtgcaatggcacaatctcggctcaccacaacctccgcctcccaggttcaagtgattctcctgcctcagcctcccgagtatagctgggattgtgggcatgcgccacgacgcccggctaattttgtatttttagtagagacggagtttctccatgttggtcaggctggtctcaaactcccaacctcaggtggtctgcccacctcggcctcccaaagtgctgggattacaggcgtgagccactgctcccggccccttaatcaaatttctatcctttctttaaagttccctaaaatcaggcagtgtttgtttcattttgtctatacctattttacataatttgttatttaattacagttcactgcatatgtttctctctccttcagtccctctctctccactctcctcccccacaccccattcagagaactaaggtgtaagaactgtatctttattatgttcttatctccagggcctaaccttgggcctggtgcaaaacagacattcctttgtgtggtgaacccaactgaaaatttggatccaactgccagctataaaagcaatttccaaagataagttccaaaggtcagcacagatgattccactggaataactgttctggctcccagattacctatgagtagtctcatgtggataaacctggcctcagtttacctgttatgcattcacactgcttttctgttaggaagtacctgagcaaagatattcacccaaagcacacagcctcctacgcccagaccctcttcaagagaacactcttgacttctttagctctcttacagtcttaaaaattcattgatctattctcttaccacctttattctaggaaatgtaaaagaaatgtaatactgtaatgcaaagtcttagggatttctgtgaagcctagtggaggatcaatccaaagtccagtcagcctgggaagttctttcttaagaaaatatctcattgtaccaggctgttcattctctccctctatagtgtttacctctcatatttgcagacttatcaacagtggctactgattgttaagagtccagaaaagagccgggcgtggtggctcacgcctgtaatcccagcactttgggaggccgaggcgggtggatcacgaggtcaagagatcaaggccatcctggctaacacggtgaaaccctatctctactaaaaaatacaaaaaattagccgggcatggtgatgggcgcctgtagtcccagctactcgggaggctgaagcaggagaatggcatgaacccgggaggtggagcttgcagtgagccgagatcgtgccactgcgctccagcttgggcgacagagccagactctgtctcaaaaaaataaaataaaataaaaaaaagaagagtccagaaaaggagcttgatttaagtaaatgttcacagtaccttcaaacaataaaggacccttattaggtgtttaataaacagaaaactgtgttttcagttattattggaatttgttgcttttaataagtgcaactgtgcaacgtaaggtgagcactgcaacaaatgtctcattataggggttctcacctttaagaccttttcaatcttggtataaaatacattcactttacattcactttatgaatgcttctctctcccaacttaattagcaatgtggccctcaaacaaatgtgaatccactggggcaggcgccaaaaaaaaaagaaggaaaatagacttgcctaaccaccacaaagctactgaaagatggtccaggagggattcaaacccatgctcagagactaccatgccagtcatatttttaataccctatgcagcctcagacaagttgagacttgctcaagaacacacagctattcagtggaagggttggcctggtatcccagctcagagccaatgcagtccccacaatgttcaccttaaatttggtctaagagcttggtttctgcaaatgagtcctttttaggcttcaaaatggtgagaaatcctcaagcactgagagctcatgagactctaatgcctagcttaaatcaacatcctatcctttcatttaaaaaaatctttgaagcttctcacgttccaccagacaacgagaaccaggaacaaaactcagccaattcagtgcagcataaaacaagtatggtaacccctgggccccttgggaactggcgggtcaggtgtataaatcccacttgttctgggacaaagcagaaagcagaagggcagggcagcagctgctggggaaaagccaagagaaaaagatcacattttaatgaagtgactatcaaaaagactaacagtaaggattaacatgcctctagatactctccctgtaacccaaagggttttcttcctcactagcttaccaaattttaccaaaaggagtgtctcaggaaaaaaaaagattagatgatttttaaaagagctttcgagcttctctaaaccttggattgttcttttgtaaaaggagggatcaagtgatttcttccagctctgagagactgacaccaaaccaagggcctctcctttttcaggttaaggcacagacacaggtatctcagaaagtttccttcttgctgttattctcttcttcccttctttggtttatttggaaaaatttgtgaggggtaaatgtatgtgtgtttgaaacctgaatctgtcactgtttgcctctgtgtccttgggcaaattatttgacctctctgagcttgtctcctaatctttaaaaagaggataataccacctgctttacaggattaccaagtggattaatagaaataatgtaatagatgtgaaaatatctcccatggtgccaggcacttagttggaccgatttgtgactaacttctcttccttcctgcgtgtgtatctaggaagttggctggggaaaaggttaagctgaatacagaaacttctaaaatctgaagggaaggttttcaaaacaaactcagcaaacttttttctatgtgcccatgtacaaggcacagagtaggccaggaattactggggcccttggtgtgtactcatggggtgtgaaggacatggatatacacagaaataacatgtcagagagggacaaaccaggtgctacaggcaaggcaaactcagtacattaacaaaatacactgcagtgacaaatgagacagatggttcttatgtctttcaggccacccagactgcaacttccaaccagaagttcactcaactgtgaatgagtaggcattttcttatctatggagggcctataaaaatatctttatcagagaactggttaaccaattgatatattctcatacagcagttctctgccagttgtcaatgatagaggaaaaaaactactttatgccagacaatgtcctaagcactacgcaagtatgagctaactgaatacaaagatcccatgagatcaggactagtcttaaagaactattattgttctcattttacggaagaggaaactgaaatactcagctaataaatgtttgagctgggattagaccacaggtctagtctccaaagcctgtctttttttttttttctgagacggagtctcgctctgtcacccaggctggagtgcggtggtgcaacctcggctcactgcaacctctgcctcccaggttcaagcaattctctgcctcagcctcccgagtagctgggattacaggcacctgcccccatgcccggctaatttttgtattttagtagagatggggtttcaccatcttggccagactggtttgaactcctgaccttgtgatccacccacctcagcctcccaaagtgctgggattacaggcgtgagccactgcacctggctcaaagcctgtctttaactacattttagactttctttcctggacaaaacaaattacaggcagaaagacatgataaaaaagaatcccagaaagaatgttcaaggaacactttaatgaaaccaggcattggtttcatgttctagttactattcaatgtaaattaataggtaaaatagtctaattctttctactatataaaaatagataaaggatgagaaagaaggtagacttgtaagagactgctacagtttcaggtcctctcattgaaatgagatgtgtgtgatggtgggccctatcagacccgctcaaggttacactaacaagaaggcagccctgttctgggaatcagctcagcctccagaagatgcagaaaatccaccatgaatgtggaaagcctaatacagccccttgatcatgacggatttttatttagttttgaaatcttgtggtcattttggaccctaccctgctccatcacatatccaggaccatccaagtcaccctggcctgcctatgtcaggaggcatcttttattggttggtgccttcttcattgctaccactaagacctcatctcagggcccactatacccacctccagattggtggccctgtgcccacatcatgagtcttcctttctctaaacctacggtgcctactgtagactagaaacttccaaaatcctcagcctggcattaaaccctctagtccggttgcacccacattctcagctgtaccttccacttcctatgaatcttccacctcccaatccttgcctctaccacacgtatttgctaccctttatgaagacctgaaacttgcctacttttgtctcctactcccaaagtttcttccctactaagatatcatcttccccaccttctttaagcctatttaagatttctcaagtcttacccacttcaagaagtattccctaaccaaaactgatggccaccctggataccctgctattctttaaacatgccaaacacattccctgacaactcacttcttctatccccttaccctacttcacttctcttcaatggatttatccctgaatatgatgttcatacatttacttgctgtctatctctccccaccagaacatacactacatgagggaagggatttggtctatcttgttccttgctgtatccctaggggccaaaagagtttagcacatagcaggaactcaatatatatttgtggaataaatgtttgaagagaattctccctcatctttgaaattctataatgttatcatacgcaagccttataacagcttgtcttatcaatttttttcttttttttaagagatggggatcttgctatgtagcccaggctggagtgcggtggcttttcacaggcgcaatcccactactgatcagcatggcagttttgttttttgccttaattaccttaactagacagtaagtttctcagaggcacaaactatatataactcatttccacaaatacttattaagggcttaccatgtgccagaccctgtacgtcttaagcagcctggaatactggaaagaacactgcagaagtcttaccttggttctggctctaccactagttgagtgaccctggacaactccgttttttttccctgagcctcagtttcttcataggtaaaacaaggagactatacattatctcaaaactctctcctggctctaacacctgttaaaatttataagaggtaaaacttggtcctgcccagtgccacagacatcacaggcactcagtaaatatttgatttgttatcgattctccggttacacgaggaatctgaggtgtctcagaacatggtttgaatggaataacaagtgaaagtttaagtcccacttccttctcagactccatagtcaacttcattctgctttttgtgctacagagaggaggaagcactaaacttgaagttggaaaatatgaactctgaccaccactgctcatttagctatggaaccttgtcatttctgggcctgtctcctcatctataaaaaagccatacttggctgggcatggtggctcacgcctataatcctagcattttgggagtccaaggcgggtggactgcctgagctcaggagtttgagaccagcctgggcaacatggtaagaccccgtctctaataaaaatacaaaaaattagctgggcgtggtagcacttgcctgtagtcccagctactcaggaagctgaggcagaagattcacttgaacctgggaggtggagggtacagtgagtctggatcgcgccactgtactccagcatgggcaacagagcaagactcttcctccccaccccctacaaaaaaatcaaaaaaccatattgacctcccagctccaaggctcaaaggcactacatgccttcctaccctagggcctttttatgctgtttcctctgcctggaatgctctgtgagctttttttgccaggctaacttttacttatctccaggggtcagcataaacttgcatttttaagaaaagtattcccttcaaaaaaaaaaaaagtagaggatgggcatggtggttcatgcctgtaatcccagcactttgggaggttgagacaggaggatggcttgaaaccaccgtgggcaacatagtgagaccctgtctctaccaaaacagaaaaaaaagtagagaaaaccctcacccctggtgcactcttacagcacttatctcaattgtttaccttaactattatagcatttattgcaattgttacaattatttattgtccatctctaggattattaagcaccacaaagccaagaactatgtcaccactgtactcagcatttggctaagtatatgacacagaagaatccaacaaatattctttgaatgaaagaaagaatgcataaactaatgcatctagaggctttatgcctctagactattgtactgtgaaacctttcacaattttctaagaaacagggttcaagacaggcaacctatattacacagctgttagaaaaagttactggaaatcggccgggtgcggtggctcacgcctgtaatcccagcactttgggaggccgaagcgggcggatcacaaggtcaggagttcaagaccagcctggccaatatggtgaaaccccatctctactaaatataccaaaaaaattagccgggcgtggtggcgggcccctgttgtcccagctactcgggaggctgaggtaggagaatcgcttgaacccgggaggcagaggttgcaatgagccaagattgtgccactgcaccccagcctgggcgacagagcaagactccatctaagaaaaaaaaaaaaaagttactggaaatcattcgagttgaaggactctgtaagcttaaaaaaaatcttttttaagagacaaggttttgtttttaagagatgaagtctcgctatattgcccaagctggtctcaaactcctggactcaagcgatcctcctgccctgccctcccaaagtgctgggattacaggcatgagccaccacgcccagcctaaaaaaatttgttttaggcatttccacccctagctctctccagaagtctgttatcaccagtgaagagaaaatcccatgctcccttgctgaggaagtgacccactggtagcccagtccttgcattcaagatgaaggaagtgactgtccacagacggaaagccaggaagcagggggcagatagccagcccccctccacctcaataccctcttgccgcctctccaaagcttctggacgctgaccctggtggacccagaggtgggccacccacacaggtggctgggaaacataggagacagaaggttcctactgctgggggaaaagatggggaaggcaggaagctgcagggtggtgtgtgaggtggcggggaggtgactgcaggtgcaactaacccaactctgaagctacccttcacccttagacaactcttccttccaggaggtgtttggccgaatccctctagtctttagtctagagaggccaagggagcttccacaggaggactcagaaccccaggtggcctactttcgccacctgtagcagagatctttgggccccaaaaagaatggtccgatctctccttacccttagtcctgtcctaaacctcaaggggctccatactcccttattttctgcaaagagctcccagccccgggggactcccagacaccaagatgcccgcgagaagccttgggtcttggcagggaagtcacatcctccatttccctcagaaaacccagaacccggggtaactctcctaattgtcctgaaccctagaggatcctgtactcctcaaattccacagagcttccactataagagaaccccatgcttttcaacttccttaaaaagggttaatttgggggtctgcggccgccaggtccctccaaaaagctggattcctggcagacccagaatctcttcctccccgggacctcaactcgcgggaagcctcccaacccgcctgcccctcggagccctctgtctccaggatgccctgcctccccattcccggagtcccaccctccaaatgcctggggagcgctgtgcccaccccgcctcccagcttttctgaggagctcggacccacgaggacccaaccagcccgaaacccccgagagacagccggtttccctcaggcgccatggaaccggacttcggagataacagcgggacagggcggagcagcccttccttacccgccagcgcggacatggtcccgggagcgcggaaatggggaggaggaggcgggggacacagcagctcccctcagttccctacaactcccctcagctcctgccgccgccgcctcaggcgcgggaagaccacagccccaggcgcgaacgggatgcaccgcctacggcgccctgggaggaccaaaccacacctggcacaggggactgcccgccgacgccccgccccgccgctctcaggcctcgctcccgagacgcggccccgccccctggctctggctcgggctctgcagcggccctggcgccccctagtgcgagcggcgtcccctcgaggtgctcccgccggtaaggttgattctgcgggggccggaagtctcaacacggatgacagtccgcacccatctagtcgccctcatttacagatagggaaagttaaggatcagaggctaagttcgactacattgaaatggcgtcgctcattaggaggagagccgggatgggagcccaggcctgctaactgccagttcagagctctttccagtagtgtttggaatcaggaatattacaatggaggagccaggtctatcccacaaacagctttgaggatggacttttcttagaagcttctagctcagagaaaccacttctctgcgccactatgagtaagctgacagtaaataatctctaagtcaaagacagttggaggcgaccaaccagcattccaggagcagatcctcagccaggccaattaggtttagcgcaggacgctggagcttgtgcgccgcattggaagacgagcactcccctgcaggaacatgggcctaccattcccaggtcttccaacctttcaaaacatgccaaaaatccagatatttaggtgaaatttgccacttttaaaaaatgttgatagcatcaaaaagttcttaaaatgccatgtagaccaaatgaaacacacctggccactagatttgccctgtgggctgccagtttacaatcttctatgaggaggagggattacaggactaagagttaggacagctgactgggttatggcagctgctagctggctgagtagctttgagaaccacttccgctcattaggtttggaaggagattggggtcctctgtgtgattaagatattaatacatcatcagccaggccagctggtccctgatgacccaccctcccatcagattctctcacgctgggtctttcacaattgtcatttccttacatcagatttagatcacaggaaacatgtccaaatgaccagaaagaggatggagcccagggaaatggattctgtcccctccacccccacccctgaccaaagacaaagttcaacccagctgcctctggtcccagcagttgggtaagcaaaggcaaaggcaaagacaaaggcgagcacaattctcttccttcctgctctaattcaaaccggatgccggtcagatttttctcttctgggtgtggcaggtggctcacgatgtcctgagtgtgcacaaagtgctggggaggagggctctgtcccatttccgttaattcctgggaactcttttcagtactcagttttgtagtttctgaggaaatcattatagtaaacacaagattgtgtattgaattaaagtgacaggaatccagagactctcctgacaagctgcctcatggctagcaaacaggggacagggactttccccatccttcctacagaaagatgtaacactgtattttcccaggcaacaaagcactggcatcctgggaaccaaaacctcctgggtgtcttccctctccctccgttccacaccaaggcacccaggtctatctcttctccctcctcattctctctcacattccacttcctcctacctccagcctcatggtcttcaccagcagggagctggggaatagccaagtcccccaagttcctcccagggaagttcaggcgactctgagaaacacaagttgaaaatgtaatggaagggaatagctttctatagaaatgctatagccaagagatatatttttaatatggacccaaagaacattccagaaatcacttgtgaactcaagggggacttctggagggtagagaaagcctgggcagggagtagaccaactgagtttcaatagcacccaggttacctgtccacagtttgtttcactggccatagcttggtcagtccctagggccagatcctgccagccgcctcacagtcaactctctgagcctaggatcctgaaacctggaccttgaaaaacaactcaaggttctgccctcttgaaggtactggtccactggtacccaaccagacttgcccagtgtcacttccacttgcttcaaactgagccagtctctgccctccctgaatcatcctacccaaaactgactgtgttaatcttccaaaagtatgtttctggacctgtcatctctctgttcaaaacccttcaacagcaccccactgcctacaaaataaaagccaaaccagtcctcatgagctgactacatctcaccctgcggacttgtctccctattcccttcactccaggactctgctttttcctgagcacatcctgccttgcgccacctgccattcctacaacaaccagctctccaggttctctgtaattttgtgccccactctgcccagagtgcagtcttgtttctcaactctaaatgatatagtggcatctgtaacatcacaaagtaggactaccagacattaagtgcctccaggtaagacgcaccaagtatatactatcacctatgacgtagtcttacaaaacaaaaataataagcttgaatctggtcaagcttctagatctaacaaccaacttacaggaaatacatggagaagaggagcttaataacatttccatgatgcaaatagcaaaaatgatgctgtgggaaatgcaacaggacaaataacctagtttctttaacagataaactgcagagtagaaaaaatttcatagacaggccaggcaaggtggctcacccctgtaatcctagcactttgggaggctgaggcgggtggatcatgaggtcaggagcttgagaccatcctggctgacatggtgaaaccccgtctgtactaaaaatacaaaaaaaattagccgggcgtggtggcgggcacctgtagtctcagctacttgggaggctgaggcaggagaattgtgtgaacccaggaggtggagcttgcagttagccgagatcccgccactgcacttcagcctgggcaacagagcgagactctgtcacacaaacacacacacaaaaaaacaaaaaattagccaggcatgatggcgggcgcctgtagtcccagctaccaaggaggctgaggcatgagaatcacttgaacccgggagacgggggctgtagtgagctgggatcgcatcactgcactccagtctgggcggcaagtgaaactctgtctcaaaaaaaaaaaaaaaaaaaattcagagacaaataatagcaatgtatgaaactgatttggatctcaattgaaactacacaagttatgagacaactagggaaatctgaacaatgtgattggatatgatgattttaagaaattttttaaaggtattttgctttttttttttttttgagatggagtcttgctctgtcgccccgactggagtgcactggtgcgatctcggctcactgcaacctctgcctcccgggttcaagcgattctcctgcctcagtctcccgagttgctgagactacaggcgcctaccgctacgcctggctaattttttgtattttagtagagacggggtttcactatgttgcccaggttggtctcaaactcctgagctctggcaatccgcccgcctcaccctcccaaagtgctaggatcacaggtgtgtgccatcgtgcccggcatattttgcttgtttttaaaatacttgagatgcatatcgaaatacttaataaatgacatgactggggtttgtttccgaatagttcagacagtgggagaggaacagcgtgcgggaggtatagatgcaacaagactgatctgagttgatagttactggagttgggttatggctacatggaggctttattgtcctgttctactactgtttttttttttttttccccatcgaaaacaaaaacctaaggccgggcatggtggcttaaacctgtaattccaacactttgggaggctgaggtgggagaacctactgagaccgggagttccaggctgcagtaagctgtgatcacaccactgcactctagccagggcacccgagtaagaccctgtttctaaaagggtctgttgccctggctggaatgcactagcatgatcacaactcactgcagccttgacctcccaggctcaggtgatcttcccacctcagcctccctcccgggtagctgggaccacaagcatgcaccactgtgcctggctaatattttttatttttgtagagatggagtctccctgtgttgcccaggctggtctcaaactcttggcctcaagcgatcctcccacctcagcctcacaaagtgctggggtttgtaggtgtaagccaccatgcctggcctaaaattaaaatctttcaaaaaaaaaaaaaaaacctggtcttttctcattgggcttatgagctcctgaagttccctcacctttgcattccccactgtatcttggtactattcaatttgataactgttagatcaaaatctaagaggaagaaaaaaagctcttttcagaggaattacttgtagctctggcatgttgggaaggctgaggctgggccagatttgtaacctcagcaacatcttccatctcacactacaccctgctactaaggaaccttagggagggacacaccttctgctcgagagagaggacttggctgacagcccacctgccctgttactaaacagatggagagacgctgacagtgagtaacctgattgttctaaaggctctgataagtgacaagctaagctctattgtggcagcttgtcacttacgaagctcaggaatgccatgtacttgtcaggactggggctgcctgtcagacaggttttatattgggcaaggctgtgtatgaagccaggcctccagcctacatttatcatctctaattatcaatagtcgtttaaagactttctttccttttttttaagagacagtctcgctttgtcacccaggctggagttcagtggcatgatcatagctcaatgcagccttgaaactcagggctcaagcaatcctcttgcctcagcctccagagtaactaggactacaggcataagtcatgcccagcttctttgaagactttcgttctcagtgtgacattacggaggatgcacaggagcctccaggagggcataccagtgtgactactccccacccactcgccctccacaacacagacaagaagtccaagctcatagtaatgtaaaaccatttgtttaattctaaatcaaatcactttcacaacagtgaaaattagtgactggttaaggtgtgccactgtacatatcatcattttctgactggggtcaggacctggtcctagtccacaagggtggcaggaggagggtggaggctaagaacacagaaaacacacaaaagaaaggaaagctgccttggcagaaggatgaggtggtgagcttgccgagggatggtgggaagggggctccctgttggggccgagccaggagtcccaagtcagctctcctgccttacttagctcctggcagagggtgagtggggacctacgaggttcaaaatcaaatggcatttggccagcctggctttactaacaggttcccagagtgcctctgttggctgagctctcctgggctcactccatttcattgaagagtccaaatgattcattttcctacccacaacttttcattattcttctggaaacccatttctgttgagtccatctgacttaagtcctctctccctccactagttggggccactgcactgaggggggtcccaccaattctctctagagaagagacactccagaggcccctgcaactttgcggatttccagaaggtgataaaaagagcactcttgagtgggtgcccaggaatgtttaaaatctatcaggcacactataaagctggtggtttcttcctaccaagtggattcggcatatgaaccacctactcaatactttatattttgtctgtttaaacactgaactctggtgttgacaggtacaaaggagaagagatggggactgtgaagaggggagggcttccctcatcttcctcaagatctttgtttccataaactatgcagtcataattgagaaaaagcaatagatggggcttcctaccatttgttggttattgctggggttagccaggagcagtgtggatggcaaagtaggagagaggcccagaggaaagcccatctccctccagctttggggtctccagaaagaggctggatttctgggatgaagcctagaaggcagagcaagaactgttccaccaggtgaacagtcctacctgcttggtaccatagtccctcaataagattcagaggaagaagcttatgaaactgaaaatcaaatcaaggtattgggaagaataatttcccctcgattccacaggagggaagaccacacaatatcattgtgctggggctccccaaggccctgccacctggctttacaaatcatcaggggttgcctgcttggcagtcacatgcttccctggttttagcacacatacaaggagttttcagggaactctatcaagccataccaaaatcagggtcacatgtgggtttcccctttccttgcctcttcataaaagacaacttggcttctgaggatggtggtcttttgcatgcagttgggctgacctgacaaagcccccagtttcctgtggcaggttctgggagaggatgcattcaagcttctgcagcctaggggacagggctgcttgttcagttattactgcctcggagctccaaatcccaccaaagtcctgactccaggtctttcctaatgcacagtagtcagtctcagcttcggcagtattctcggctgtatgttctctggcagagagaggcagatgaacatagttttagggagaaagctgatgggaaacctgtgagttaagccacatgtctcaccaggaataatttatgccaggaaaccaggaagtcattcaagttgttctctgaggccaaagacactgagcacagcccagagccaataaaagatctttgagtctctggtgaattcacgaagtgaccccagctttagctactgcaattatgatttttatgggacagcaatttcttgcatctctacagaggaagaagagggggagtgggaggggaaggaaagagaacagagcggcactgggatttgaaaggggaacctctctatctgaggagcccccactggcttcagaagcaacttaccaaggggtatttaaagacatgaaaatttccagaaataccatttggtgcatccctttgtttctgtaatattaaactcaggtgaaattatactctgacagtttctctctttctgcctcttccctctgcagagtcaggacctgcagaactggctgaaacaagatttcatggtgtcacccatgagagatgactcaatgccaaggcctgaagttatagagtgtttacagcggtggcgatattcaggggtcatcgccaactggtctcgagttccaaagctctgatgaagaaacaagactccttgatgtgttactgatcccactgattccaggagtcaagattagccaggaagccaaacaccaggagttggggtggcacgtcaccagtccagagccctgccacggatgtaggcaggagcccagcattaggcaatcaggagccagaacatgatcaccagggccacaaataggaagaggcgtgacaggaactgctcgtccacatactggggtgtcccagggacagctggagagacagaaaggagaaaacaggctattagaacactgcagctatgcacactgcccactcaggccagaagttgacagcatcaatctttatctctttacaacatcagaatcctacacacaaaaagatttcttttttttttttttgaaatgtagtctcgctctgttgcccaggctagagtgcagtggcacgatctcagctcactgcaacctccgcttcccaggttcaagcgattctcctgcctcagcctcctaagtagctgggattacaggtgtgcgccaccaagcctggctaatttttgtatttttagtagagacggggtttcaccatgttggtcaggctggtctcgaactcctgaccttgtgatccgcctgcctcagcctccaaaagtgctgggattacaggcatgagccaccatgcctggcctttttttttttttttctttttgaggtggagttttgctcttgttgcccaggctggagtgcaatggcacgatctcggctcactgcaacctccacctcctaggttcaagcgattctgctgcctcagcctcctgagtagctgggattacaggcacgcaccaccacacccggctaattttttttttgtatttttagtaggaacagggtttcaccatgttagccaggctggtctcaaactcctgacctcagatgatccgcccacctcagcctcccaaagcgttggcattacaggcatgagccatcgcgcccagccaaaaaaaatttctaaaccccaaataatatcaggcaaaatgaaactatgtggaacaataacaataaggacaagacacggtccaatttatcataaaaggtttggcctgcacatgcaaataaaccaggtgattaacaggaaactcttgcaggaaataatgaaagcaagcctactatttgttaagtatcttctatctgctaagtgttttgtacatgttattatttggtggatattattatttccattttgagtaggaagcagctgaaacataggtttgaggtgacctgttcaagattgaaaggctcagaaattagtggcagagctctgcagcctctccacacactgcctctcaagggccccacagggattgccttccttttccagaagagaactaggatccagacaggcaaaatgacttgtttttcaaggtagaggcagaactggggtgagaacctaagtctccactcctctctgctttaggaaaagctaccatttagagctccctgtcctgactttgggggaaggaggataaaagaatctgtgtccaggatgggcaaattgtaccaagcatgacaagggaaaactgtgactgtggcagggggataaagtaatccagagtctagcctggctgtggaactctgcttagctggggaatccaaggttagccttcgaccaggttagaaggatgcaagctatcaggcaggttcttgctggcttcacaggaatttgccctttcttcagggcagagtacaccctatcttttggggtatacttcctctgaaaaacaaatgtgaacagaggataaaccttcaaggcagataaagtaagaaagggcatccccagggccgggcgcggtggctcacgcctgtaatcccagcacattgggaggcccaggcgggcggatcacgaggtcaggagatcgagaccatcctggctaacacagtgaaaccctgtctctacaaaaaaatacaaaaaaattagccaggcgtggtggcaggcgcctgtagtcccagctactcgggaggctgaggcaggagaatggcgtaaacctgggaggtggaacttgcagtgagccgagattgtgccactgcactccagcctgggggacagagcgagactccatctcaaaaaaaaaaaaaaaaaaaaaaaggcattcccaagatatcttggtgctgagattcctcagctagatgctctgatggattcacgaagacagacaggcaggcaggcaggcagtcaagaaagacttatagatcacctgctgtgtaccaaggaccagggtggggatgagaataactgggatgacccagttaccatctttagggcataagctcttggcgtgaaccacacaatggtcacttctgtaccatatgctgtgtccagtgcacatgaagctccaacaagtgcaggcagagctcaaccgatcatggcatctctgcaggctccacagtaaggatcttggcttgggtgtcagactgtgataagagttcaaggcacccacctcatagaggtggcttgcacctatagagcaagggctctataccgaatgcggatggcactttcaagcagtaggagggagaactgcagcagcagttggtagacctaggcatggttcccacagggctgaggctgcttctgaccagcctcatgttgtgtcctgaaggaagctagacagagatgccagagaatggagatgccttcactccttatgggtcatctcacatttccaggcccccaaatggtcaaagtgggaagtaaatgtgcagaactaggcttttcctcagctgagtatcacttacagttttccattttatagacatggggtatgtcttggtaacattactgagcattttctgatctgttaaacgcagctaatcacacacctgttccatagggtggttgtgatgatcccctgagcttggaatggaaagtgctatatatatgcatgcctaatagttggtaagtgctcagcattgttaccatgtctgtaagtgatctaaaaacagcttaagatattttgaaaaggctgattatccatgtagtgacaattatctgtaacttatatactgctgaattccaaggagctttcaagcaatattactaagatatcttcctaatttctcaaggaaatagggtcttacctggaggaggccgcccatcatttatattaaatgctgtggcaaatatcccaaagggaaatgccccaattccaaaagacatctggaagccaccatctccaaatccaaatccttgaaatccctgtgtggaagaaaggcaattaagggcaggagaatcaggcaggtttctcctgtgcctgtcaaaactcaacatacctcacgttgtcttgcatgtggcacctgcctcttctccctaccttgtgccacatgtttcgaaggtgggggacagcttttcctcccatatataccctgaagtagaggaactctggcaagccctctgcccttttagccttagcttccagctaagaatctatgaatgggccaaaaaggactggctctgacccagtgtgaaacactctgctgacataagtcagcactcacagggcttgaggatattttccatagtcccacattagctagtaacaccttctacatgctttataggagcaatattgacagccacccctgtgcccaagggaacatcaaacaagctacacattatctttaatagcaaaaatgttgaaactctaattagccaacaatggaagtcatgatcaaaatcttgatacatgcattcaaagaaccattaccctgacttaagcggtaacactgaacaactcttgtgaccaagttatcagacaaaattgtttgaacactgtggtcacaactacatgacaatatgtaggtatatggacaagttacggattaaaatttcttttaatactgttacatagaatttttacattttaaaacactataatgttttctggttataaaagtaatatatacttgctataagaaactcacatattacagaaataattgacagagtcagagatcttctattcaccttcccacttcgcagccactccactttacctctgaaataaccactatcagcagtttggtatatcaccctcagttttctttccatgtgcatgttctacactgcatcatctttcacatgaaaagattcagcaggaacaatactgtgaataaataactcccttttttaaagcgtgagctctgtgctaggcaccatgttaagcactaggacatataaatcatgtttaatttttacattggcttcatctgcatttcacagatgaccaaactgaggcttggagaggtgaaataacttgaccaaggagtacagtttagatctaaaactaggtcaatttgatctgaaaacacatgcttttctttttcttttctttttttttgagacagggtctcgctctgtcaccaagcctggagtgcaatggtgcaatcatggctcactgtagactcaacctcccaggctcaagcaatgctcccatctcagcctcttgagtagctgggaccacaggtgtacccctccatgctttgctaatttttaaattttttgtacagatagggtctcactttgttgctcaggctggtctcaaactcctgggctcaagtgatcctcccacctcagcctcccaaagtgctgggattagaggccagagccactgtgcccggccttcatgctcttaattactgtgcgcatctttcaaatatttttttctcttcccctgcacccctgatgagaggtttagaacaaatgattttaaaaataataaaaagcagacagactattgggtcaaatgctcttcacaaagagctcaatggccttcatttatgagttttttgcaagtcacaaaaatagctgctctccatcacacactgatcagcctggcatctagttccaaacttcttgccagatggcatcacctataaagcctaacagctgacttaatgagagggcaaacctaaagggagggaaaacaaagagtttccatctcctcaatacaaaatgcctcctactcagttcatggttgaatctaatggctcctgggactgaggctgccttacttgggaaggtgcaattgtttcatcaggaaccacagattcattcagtgcaatcctgaggactaaccgttctgcttcccttctagcaacatctttatgatctcaccagtccatacatttggtgggattatgttcctgggccagagtatgcaaaaaaacatcgctagtagctgcaggtgcttataaatgctagaggtatgcactttggtcaacaaggccagggcctctggcttctgggggcctctgattcctgcattagttgctaatgctctgtaggaaaccaaaacctaggaatgttaaagtggtgtcacctggtggtcaagagcagagacttcaataccagccagatctgggtttcagcactgtacgtgtggccctggacagatcactttacctatctgggcctcagtttcctcctccgttaaatgagttgatgtgaggcttaaatgagatcatgcatataaagctcttaacatatagttatttccatatagtaaccattcaacaagtgttcactgctagtattattattaagggtaatccggagaagagaaccttaatttctttctttctttttttttttttttgagacagagtcttgctctgtcgccaaggctggagtgcagtggtgtgatctcagctcactgcaacctctgcctcccgagttcaagtgattctcctgtttcagcctcccgagtagctgggactacaggcacatgccaccacacccggctaatttttatgtttttaagaaagcagagacagggtttcaccatattggtcaggctggtctcgaattcctgacctcaggtgatccacccgcctcagcctcccaaagtgctgagattacaggtgtgagccaccacgcccagccgagaaccttaatttctttcaagatccctgactcaataatcctactcctggaaatcctaataaaatgccattattcaaactcaaaaaaaaaaaaaaaaaaaaaaaaaaagaaagtggcagtgcgcggtggctcacgcctgtaatcccagcactttgggaggccaaggagggcggatcatctgagcttgggagttcgagaccagcctgaccaacatggagaaacctcgtctctactaaaaatacaaaaattagctgggcatggtggcccatgcctataatcccagctactctggaggctgaggcagaagaattgtttaaacccgggaggcagaggctgtggtgagccgagatcgcactactacactccagttgggcaacaagagtgaaacttcatctcaaaaaaaaaaaaaaaaaaaaaagtgtgcaaagatggttattgtagcattatttaaacagcaaaatggggaaacaactaaaaggtccttcgatgaggaaaacccaaattacaatgaaccaaaactcaatgggttcccagcaatagcatggaaaaataaaaaataataaaaaactcaataggataaatggcagcctaaataataaagaggacacttcagagcatcatggaaaacctgccaaaattaaattttaaagcaaacagaatggtgatggctacataaaaatacatatgcacagcctacagatgaagagaacatgaggatatgagaatatacttgttctgggctcttggcaatggtgggtaaatattttgcttttaaaatttctttaacattttaacagaatttttttaagagtaacatttgatgtaaatatgcaaaaaatgtaaatgtttttgttcctagccactagaccactagagacaaatgtgcaatttttttttagccagtaatcttacttctaagaatttatcctaagccaggtacagtggttcacgcctgtaatcctaacactttgggaggctgaggtgggaggattgcttgagcccaggagttagagaccagcctgggcaacatagtgagaccttgtttctacccaaacaaaacaaaacaaaaaaaagaaagacaaaaaaaaactcaaaaaactagctgggcatggtgccgtgcacctgtggtcccagctacatgggaggctgaggtagactgagcccaggaggtcgaggctacagtgaactgtgatcacaccactgcactccagcctgggctacagagtgagaccctgtcttatcctaataaaataataatgaacatgctcacaaatttatctgtaagttcatcaggattttttttaacttggaaaaagaaagccgctaatgtctaacaaaggattgaattatgttaaatccacacaactaaatgctaaacagctagttagtaaaatattgctggcaatgtaaaatctcaagataatactaaaagactcccactcacacaaagaaggtactaagtatctgtagaacaaatgaaattttaagagagggttacaaaacaggagccacatattgtaaaaaacaaaaaacaaaaactgtaaaaagtatacacacatctgtaaaatacacgcacagatttgtaaaatttgtgtgtatatataattatagaaaaatggaaaagaaaatagaaccaaaatgtttccagtggttacctctggattggtgtggttataagtgatttttttccccctcttttcctttctgtattttacaagttttcctttacttttataatcaaggagaaaaattgtaaggctaagaaggaaacttctaaagccatcagctcatttgtagaagcttctcctagaatgttcctcacccctctattctccggctctggcctctgtccttgaggacgaggaggggtcttctctctgaaacagaaatggtgtaaaataagtctattacaaattgctttgagttgctccctgtgaggacctggagctctttaccaacagggtcagggccatagcctctttcttgtccaggacatgaacttatgccagattaattctccaaatacgaactcttcattctacctgcaactgttcttcccacgtgtatagagaaccagggagaaaatcaactcgttatgagatattcaccagattgcactacagcctactcctcttacagagatcctgactcagatcggttaggaatcatggccagatgccttccctgggcctgttacagataacagaaatcccaaatccatactggaacagagggtgggttgtcagcagtaagggctgaggttcatggtttctctgaccttcccctattaacttcagctctatctcctactattcttgggcaaatacccaatgctattatttttgagtctcaccccctcaaatcactcaacccatgaatactcaattgagggcttagttatacaataagcattatgcaggatgctgtaatactgatgacagacccaacccttgaagtgttcatggtttcaagggggataaagccagtcatatgacactgtggtgggaactgggtgagagcaactaatgtgaagaagacagaccacttcaaggaagagggaactttagggctgctcataagagatgagtagaagttagaggagcaggtgggggtagaggggtagcttgagcaggactggggagggaagaaggcagaagagagagcaaatacacaggctgataaatgtgaaagagcaagtccctttaagagaaagtctaatatgtcgggtacacagcatatgctagggtagctggataaaggtaagagattcttctggagagcttggggatgccagaccatgaagggctctcaatacttgtgtttgttgaatgctggacccatgcacatctccatttctagaaatcccaaactccacaaagtcacccagatcctgtttcccctcccgccatgctttatacatcactgatgcagcaaccctgctccctggagcctctcctgctacatatcctgcttcccaggttgcagaaatgctctttcacagggctctgcacacttgtgattgtgatgtctgttcactgctgggtcctagcaagtggcaacttggatcccctctcttccctcccctcctagctgactctcatctggatgagactgcttcgaaaccaagagatcatctagtactaagtaaagggtggggttaggggatgctgaatgggagtgaattcacatccaaggggagaagtggttgggagaggcatcctgagtcctcacctggggtcctgttgcccagtgctgccccttccatagagggggatgaccttgtctcggctgatgccagctttgcaaacaggacacacctgtctgttaggtctggtctccaaccactgcaaacaggagagaaaaatgcatgtggatggcccaagacccaccagagtgatcagccagagccaccagaacaacacaggccagaggcctcaaactgggaaacaccagcatgagcagggaacatctcaaggaacctgactcccattccttctcctaccattcagcaaatacctaccagtggtaaaatcaaaattgcctttaaatatcatcataattggccgggtgcggtgctcatgcctgtaatcccagcgctttgggaggcggaggtgggtggatcacctgaggtcaggagttcaagagaagcctggccaacaaggtgaaaccccgtctctactaaaaatacaaaaattagccagacatggtggcgcatgcctgtagttccagctactcgggaggctgagggaggagaatcgcttgaacccgggaggcggaggttgcagtgagccgagattgcaccactgcattccagcctgggcaacagagcaagactctgtctcaaaaaaaagaaaaaaaatcatcacaattaggcttcttcatgctttgtttctctctagggcctcctagcaacacagggggagggaaactgcaagtctggggctgtcaagtctgacatgcccagcctcaatttaggctgctggtgtaagtacagcaaactttaaatccccaccttcccagtaggagcaactgtattttcctgtcagtcatattcttctttctgtgatttctcatttttttttccccagacagagtcttgctctgtcacccaggctggagtgtagtggcatgatctcaggtcactgcaacccctgcctcctgggttcaagcaattctcctgtctcagccttccaagtagctgggattacaggcgcccaccactgcgcccagctaatttttgtatttttagtagagacagggtttcaccatgttggccaggctggtctcaaactcctgacctcgtgatcttcctcccttggtctgccaaagtgctgggatcacaggcatgagccaccgcgcccggccaatttctcatttttatagcattttcccaacaactgtgtatcccaggcatcagaatcaggagataagctgatcattttctggtgacttaccacatgctaaaggataggttttgctcattatctaaatttgcttaatgctttttgtgtactttcattgattttttgcattcacctatttctttcaatataaaaaaaatcccgttttgggtttctcaggccctttcactggttacattaaaattttttgtttaggccaggcgcggtggctcacgcttgtaatcccagcactttgggaagctgaggcgggtggatcacctgaggtcagcagttcaagaccagcgtggggaacatggtgaaactccgttgtctctactaaaaagacaaaaaaactagccgggtgtggtggtgtgcacctgtaatcccagctacccaggaggctgaggcacaagaatcgcttgaacccgggaggcggaggttccagtgagccgagatctcaccattgcactctagcctgggcgacagaatgagactgtctcaaaaaaaaaaaaaaattaattttcttaaaaaaacaagtgataaaaaatgtttttggtttgtttttgtttgttttttgcttgtttttgatttttttttcggttttttggttttttttctcgaaacagagtctcactatgtcacccaggctggagtgcagtggtgcaatctcagctcactgcaacctctgcctcccagattcaagcgattctcgtgcctcagcctccctagtagctcggactataggcgtgcaccaccacgcccagctaatttttatattttttgtagagacggggttttgccatattggccaggctgttctcaaactccttgcctcaagtgatccacctgccttggcctccctacgtgctggaattataggtgtgagccaccacacccggccaaaatgtgtttttatagacattctataaacatgaatctaggacttcagggctgaggagatggcagcactgaatgattttatttactactcttactgttcatagctccaaaacttaatgtgttatgtgttcttcataaactcatagtcaatatgtactaccaggtcccgctggggacagaatgtgcagccctgttcccaccttctttctcccatccagattctgaagctttagcagtctggaacttctgtcctcccccacattcccaggccacctacgagtgtggtactctactgctgacgaccagggagactttcagcaggctgtgattattcacagccacttgtgaatgccaggcccagctctgtctcaccaagtaggtgctaaagctaggaaaatagacttttctctcctcacaaaagctctttgttgacaccaaaaaaattttccccttcctaatattttcataacctttaagggctgggggactgttgatatgataggaggcactgttttaatagaagcagaatctcaaaaataaaaaggacctaactaacatactatcaatccaatccaatttataaatgagtaactgagatccaaaaaggccctctgtggcagaattaggaccatcccgatttcatcaagtgtctgtcagtggacaggtatgtaaagaaggctgtgggggtaagtaagcaaatgagcccacaagcagggcagattgcagcttctgaaagcagtctcctgagactagggctctcttgtgcaaccagagctgatgaaagacaaagtaaaatgaaatgcatcttacctgatgtaaacacggccaactgccagagtccccagggcaaccagtcatcaaggagaaggagaaaaggggaaaggaagaaaaatgttttcattagcagaaacacttgatgggtggagtggtagtagcagaatgagaaaacaggagtaaactatggagcactgcatgcccattgaggttctgtagggattactggtatcggaaattaaaaaaaaactggggtaaaaatcacagaaaataaataacgcaatggagataagaccccagcctctgcccctgagatctcagtatatgtgaaatccccagggctcagaccacacagacccagcttctctacaaatcaccctgtgagaggttacaacatctgaaggaatccaataaaagctaaggacaccctgtgcaaaaaattgatgggggcattcacatacacatgtactacacactattttacactcaatttcagtgggttcatagtctcctcgggctcacaagggatgtgtggactctcaggtagtccagatccagtttaacaaaatcttcaggctgtcctcatccttgagaactctcctagcaggaagcagcttaaaagttcaggtctactctaaaagcatctttaagtaatagaaaggatggggatgctacttgacagaaagggttaccttcagcttagagagctgctgtccaatctctctccattttcaaatgaggaaaccaaagctcagaaacataaaatgaactgcatcaggattaaaaaaaaaagtctcctgacttctagttcattgccctttctataatctaacaccacatacaaaaaaaaaatgatatctacagaattgaaagaaaagtattcaactccacttttttttttttttttttttgagacgaagttttgttcttgttgcccaagctggagtgcagctcactcagctcactgcaacctccacctcccaggttcaagcgattctcctgtctcagcctcctgagtagctgggattataggtgtgtgccaccacgcccagctaattttttgtatttttagcagaaacggggtttcaccgtgttagtcaggctggtctcaaactcctgacctcaggtgatccgcccaccttggcctcccaaagtgctgggattaaaggtgtgagccaccgtgtctggcccacatttttaatttctttctctcgtttatttagttaacacatatctactgtgtacctactatgtaggccaggacagtggaaaatgcaggcatggcttctgtacctcacataccaagtatctttagctgagtacactttgaactcaaaggatagttccttttccaattcctgaaccacagtttagcttcacaaaccaaatacacaatcttcctggccataacatctgactccaacattaatcttgcaatgtcattctaaactgagtggagaataaccccaaatcatggcagatctccactggcaagttcccttaaagactctaggggagaagtggaggtgaatgaatgaccctcaggggaaagtcaggctttataacaacgaccattcctcccatttattaagcaacgatagtcatgtatcactgaacgacagggataattctgagaaatgtgtcattaggcaatttcatcattgtgagcatcacagagtgtacttacacaaacctagctgaaatagcttactacacacctaggctacatagtatagcctattgctcctaagctacaaacctgaatagcatgtgagtatcataggtaactgtaacagagtggtaaatatttgtgtatttaaacatacctaacatagagccaaggtgtggtggctcatgcctgtaatcccagcactttgggagctgaggtgggcagattatttgaggtcaggagttcgagaccagcctggccaacatggtgaaaccccatctctattaaaaatacaaaaactagccatgtgtggtggcacatgcctgtaatcccagctacataggaggctgaagcacgagaatcacttgaacctgggaggtggaggttgcagtgagctgagatcgtgctactcaatctggagtgctactgcactccagcatgggtgacgcagtgagactccatctcaaaaaaaaccaaaaaccaggctgggcgtggtggctcacgcctgtaatcccagcactttggaaggctgaggcggttggatcacctgagatcaggagttcaagaccagcctggccaacatggtaaaaccccgtctctactaaaaatacaaaaattagtcaggtgtggtggcacgtatgtgtaatcccagcttctcgggaggctgaagcaggagaatcgtttgaacctgggaggcagaggttgcagtgagccaagatcacgccactgcactccagcctgggcaacagagtgagactcctcaaaaaaacaacaaacaaacaaacaaaaaatccaacatacctaacacagaaaaggtaacgcactgctctataacattttaaaatcactagattataggaacttttcaggtccatcatcatcttatggaaccgctgttggatatgtaatccattgttgaccaaaatgtcattatgtactgcatgactgtactgtgtgccacgctgtggctgaataccttttcatttcttaatgtcactggacggtcacattaacctatgaggcagtaccatcatctccatcttacagatgaggaaaccaaagtacagggaagctagcagatttgctcagggatgcaccatccagactggaagcatctgtttcattttagagtctgtgttctttccaatggcattctgcctttaaaaaaaaaattgatagcaggcatggtggctcacaccagtaatcccagcactatgggaggccgaggcgggcagataacgaggtcagaagatcgagaccatcctggccaacatggtgaaaacctctctctactaaaaatacaaaaattagctgggtgcacctgtaatcccagctacccgggaggctgaggcaggagaattgcttgaacttgggaggcagagattgcagtgagccgagattgtgccactgcactccagcctggtgacaaagcaagacttcgtctctaaaaaaaaaaaaaaaaatttgacacagggccaggcatggtggctcacgcctgtaatcctagcactttgggaggtcggggtgggcagatcacttgaggtgaggagtttgaaaccagcttggccagcatggcgaagccccatctctactaaaaatacaaaaagaaaattagccgggcgtggtggtgcattcctgcagtcccagctacttgggaggctgagacaggagaaccacttgagcccaggaggcagaggttgcaagtgagccaagactgcaccactgtactccagcctgggcaagagagcaaggctgtctccacaaaaaaaaaaaaaaaaaaaaaaaaaaagatatacaacagctgtacatttaaatatatgtatagttaatatatacataaaatacataatttataatcttaaaatttataattataaaatttaataaatacatacacaaacacaaacacacacacacacacacacacacacacattttttttttgagacagagtcttgctccatcacccaggctggagtgcagtggcgcgatctcagctcgctgcaagctctgcctcccgggttcacgccattctcctgcctcagcctccccagcagctgggactacaggtgcactccaccacacccggctaatttttttttttttttttttttagtagaaacgggtttcaccgtgttagccaggatggtctcgatctcctgaccttgtgatccgcccaccttggcctcccaaagtgctgggattacaggcgtgagccaccgcgcccagcccagaatatatatatatttttaagagacagggtctctctctgtcgcctagactggagtgcagtgatacaatcatagctcactgtagcctcgaattcctgggctcaagccttcctcccacctcagtctcccgagtagctaggactacaggtaccgccaccatgcctgactagttttaaacatagtggggcctcactatgttgcccagactcatcttgcactcctgggctcaagtgatcctcccaccatggcctctcaaagtgtttggattacaggtgtgagccactgagcccagccataatagctgtacacattttttatgttatatgtgataatttgatacattcacataatcaaatcaggggtatcctgtctttgaattcttaattttgtcaatcatttcaagtcctggttttacgataccctgaagtatcctgaatttctaggagaatgtggatcacaacagcttttacacaagatggtaattagggcaagagcctcaagaacaaaaatctctgctccattctatttattcaccaataaattgatgttttacgctgttgccaacttaaaatcccttaaatattgtttaaacggccttttcttcacacgatttctctgctcaaaaatattcattacctctatgtccctttagtcgaatctgggtttgataatctggctcaacactactgtaaccattatttttcctaacactcccagaccctcatccagagtgctgtgagaggtatacagtagcctcaagggtctcagatgagtccaacagtgcatgtgcctgtccctagaaactccctgccttggagtgacacacacacccttcgcctttacctagcattttttgatcgacctttcaaggttcagctcaaaatctcaagacaaaaaaaaacacacacacacacacaaaaaaccaaaatccgaccttcacctagcacctaggttctcagagccagaaagggctcctgtaaccgtcaaggctggaacagacaccgaccttgacacttcattttgatgagtgtatctatctatatataaacataaaatatagtaacaattatagtcatagctaacacatagtatttactgcaagctatgtgctcttctaagccttttacatattttgagtcatttaatgcttgcaaacgaccctgtaaaatgaggcagaatgtgtgtaagtaccttgtccaaggtcaaacaggaaggtggcagagtcaagcttcaaaaggaggaagcccagttccacagtccttgcttataaccattatgctatactgcctctaggctcagcacagcaagtagcaggtagtaagtgctcactaaatggtaagtattattactttagagatggggagaacgagcttagagtggagacaggatttgcccaaggtcatccagctcattggtagcagagctgggatgggaactcaggtctcttgtcccttgagcctgagtgtattcccaaagtgagcaggaagcattctgctccaaaccacccagggccacaggctttccaaacttggcaatgtgctctctggggtggaagtaggggtactgaccagaagaggtggccacacaggctgatgacggcatccttggctgtgtccaagcagatgttgcactcgaaagtgctgtcctgccctccgctctcgccagcgccattgctgctcccactgggcccccctgcactggagttctcaggagatgcagaggccgagggccccttgcttgccatccttggctgtcagcgaagctctgagtgaagactttccccagggaaatcctaaaaggcagagaactcttgactgtccatttctgcagccctctccccccagcttccatgccaacattcctgtcttctctaggctccagagctgattatgactgaatccctgagcagacttcccaaagcgctacagaagacaagagttgtagggcactacccaaagggcagtgacccagaaacttctcatgaatatggtccagaatatatcacacagatacgcaaactccaccaaatacagagcagcctccagatggttctccacaggaaccaggaccttgtctcacttgtctttagattcccccatgacaatcaacccaggtgacaaatacatgctacattaaatggaatgttcaggctgtccagcctctatattgatgggtgaatctgctgaggcaggaaggttgtgattgtcatatgccagaacatatatatatatttttaagagatggagtttcactctgtcgcccaggctggagtgcagtggcacaatcttggctcactgcaacctctgcctcccaggttcaagtgattctcctgcctcagcctcccgagtagctgggattacaggtgcctgccaccacacctggctaatttttgtatttttagtagagatggggtttcatcatgttggccaggctggtcttgaactcctgacctcaggtgatccacctgcctcagtttcccaaagtgctaggattacaggtgtgagccactgtgcccagcccatacgccagaatattaagaaattcctgtaactatgaaaggataggaagctaataaggaccagaaagatcatctggtccaaggtcttccatattgcaatctttttcaatcctccttctgccacattggaatactattcaccttattttatctaaatatatcaactttttagcctcagtacatttaaagaagaggtttatgtcactgtaataaatggaaaaccagtaatacttaccataagtaaaaaggttaatataaaagtaacaaatgaaaagtttaccctcataccacctgacatcacctggcacactcatactatgttttggacaatcttgatctggtccaatttctttaggaaactgcagttaccttggctagctgactaatgtggggctgagactgggactcatggacaccctgtttgcaccgtaccactacatactaaactggccactaaatgctggtataaacagaccactgttgaccaccacctccaagtcaaagaacccagccaggagttgaacaagaaagaggataaaaccaacaccaagggatacccaggaattctggatgcacattaacaatctgtcaggagccttatctggccaccctcatcacctcagaaattccaagtaggaaatgttcgctggctaccacagtcagagaagtggaggcctggatactggactcagcctctagcttgctaggtggttctgggaacctccctttccctctactgatcataattttctcatctgtaaaatgaggcactggactccctggtgtcctgggtggccccctccagctcttagactgtgcctctccaggtcatcttaacctactgttacctccaaaacaagcggccccttcacaaatttaggacttaccactggaacaccagaaggtcaccctgatgtcagcttccagagtatgagaagacaaggaccaaaaaagttacagccttctcagacccagaaagcttcctgccttcacacggtggactcagagctctggcctcatgagtatccctcaccacgataccagctcagtgacttgagcagagagaggaggccagctcaccactttttcactcagttacatcattttacataatgtcccagaagggtagctggatgctggtggcaccagtttcgtgcgctggcctcggctccaagaccttctctctgaccttcctcttcttcatattacatgtgctctcttcatcttaggataaaacccacttttgagggccacattactatctttcctcattattccagctcaacaatcaatcctaagtacccaacctatgtgtgtttctttttaaaaaaaaaaaaaaatcttaaaaaattaaaaattgctctccctccccctccccctccctctcccctttgcacggtcctcgtctcccctttgcacggtctccctctgatgccgagctgaggctggacagtactgccgccatcttggctcactgcagcctccctgcctgattctcctgcctcagcctgccgagtgcctgggattgcaggcgcgcgccgccacacctgactggttttcatattttttggtggagacggggttttgccgtgttggccgggctggtctccagctcctgaccgccagtggtctgccagcctcggcctcccgaggtgccaggattgcagacggagtctcgctcactcagtgctcaatgttgcccaggctggagtgcagtggcgtgatctcggatcgctacaacctccacctcccagccgcctgccttggcctcccaaagtgccgagattgcagcctctgcccggccgccaccccatctaggaagtgaggagcgtctctgcctggccgcccatcgtctgggatgtgaggagcccctctgcccagccgcccagtctgggaagtgaggagcgcctctccccggcggtcatcccgtctaggaagtgaggagagtctctccctggccgcccatcctctgggatgtggggagcgcctctgccccgccaccccgtctgagatgtgaggagtgcctctgccaggccgcgaccccgtctgggaactgaggagtgtctctgccccaccgccacccgtctgggaggtgaggagcgtctctgacctgccaccctgtctgagaagtgaggagcccctctgcccggcagccgccccgtccgggaagtgaggagcgtctctgcccggcagctgccccgtccaggaggtggtgggcagcccccgcccggccagccgccccgtccgggaagggaggggcagcccccgaccggccagccgccccgtccgggaggtgggggggggcagcccccgcccggccagctgccccgtccgggagctcggggcagcccccgcctggacagctgccccgtccgggaggtgggagcccctctgcccggccgccaccccgtctgggaggtgtacccaacagctcattgagaacgggccatgatgacaatagcggttttgtcgaatagaaaagggggaaatgtggggaaaagaaagagagatcagattgttattgtgtctgtgtagaaagaagtagacatagcagactccattttgttctgtactaggaaaaattcttctgccttgggatgctgttaatctataaccttacccccaacccctgctctctgaaacatgtgctgtgtccactaagggttaaatggattaagggcggtgcaagatgtgctttgttaaacagatgcttgaaggcagcatactcgttaagagtcatcaccactccctaatctcaactacccagggacacaaacactgcggaaggcggcagggccctctgcctaggaaaaccagagacctttgttcacatgtttatctgctgaccttccctccactattgtcctatgaccctgccaaatccccctctccgagaaacacccaagaatgatcaataaatactaaaattaaaaaaaaaaaaattaaaaattatgcatatagattttggaaagacaaccataaagtcagatcagtcacatcagcctcctgatgtgatgcaacagaagtacacagcaccaccaatgaaacatgtttgcgttaaaactcagacactgatcaagcatctaaaatgaattaccagccaggcatggtggctcacgcctgtaatcccagcactttgggaggccgaggcaggtggatacctgagatcaggagttcaagacaagcctggccaacatggtgaaaccctgtctctactaaaaacacaaaaattagctgggcatggtggcacacacctgtaatcccagctacttgagaagctgaggcatgagaatcgcttgaacccgggaggcggaggttgcagtgaactgagattgtgtcatcgcactccaacctgggtgacaagagagagactccatctcaaaaataataataataataataataataataaataaaataaattacctatttacagaaaatatggaggataggtgcaagtattaaacgactccatgaagatgtcatcagccaaatccagaatgtgggactttctacaggacaaacaataaagttctacaaaaaataaatagcatggacaggattggggttatagattgagatacgagatattccaaccacttgtagtatgtgggtcttattggaacaagattcaaacaaaccaactgtacaaagacacttgtgacatgattgacaaaaactgtttagcctaggtattactcgatatgaaggaattattgttggctgggcatggtggctcatgtctataattccagcactttgggaggccaaggtaggtggatcgcttgagctcaggaggtggagaccagcctgggcaacatggtgaaaccctatctctaccaaaacaaaataaaacaaaacaaaaattagctgggtgtggtggtgcatgtctatggtcccagctactccagaggctgaggcaggagaatcgcttaagcttgcgaggcggaagttgcagtgagccaagattataccactgcattccagcctgagtgacatagtgactctgtctcaaaaaaaataaataaataaaaataaaaaattagctgggtgtggtggtacacacctgtagccccagacagtcaggaggctgaggtgggaggatcacttgggcctgggaggtggaggctgcagtgagccgtgattgtgctgctgcactccagcctgggtgacagagtggaaaccctgtctcaaaaaaaaaaaaaaaaaaaggaattactgttaattttgttgggtataataatgatattgtgtttttttttttaaacaaaacctgatctgctagagacacatttttttaaatatatatatatttttattatactttaagttctagggtacatgtgcacaacgtgcaggtttgttacatatgtatacatgtgctatgttggtgtgctgcacccattaactcgtcatttacattaggtatacctcctaatgctatcccttccccctccccccaccccacaacaggcccaggtgtgtgatgttccccttcctgtgtccaagtgttctcgttgttcatttcccacctatgagtgagaacatgaggtgtttggttttttgtccttgcgatagtttgctgagaatgatggtttccagcttcatccacgtccctacaaaggacatgaactcatcattttttatggctgcatagtattccatggtgtatatgtgccacattttcttaatccagtctaccattgttggacatctggcttggttccaagtctttactattgtgagtagtcccgcaataaacatacgtgtgcatgtagagacacatatttttgaagcaatacaatgtttgggatttgctttaaaatactccaggggaaaaaaataaaaatggagagaaaagatgaaacaagaacaaggaagttggttgttgaagctgggtgatgaatggaggttcactgtaatagtctgtgtgtgtgtttgaaaattacaataaaaggtattttttttttcttttttttgagatggtctcgctctgttgcccaggctggagtgcagtggtgcaatcacagctcactgcaagctcaacctcctgggctcaagcaatcccctgcctcagcctcccaagcagctaggactacaggtgcacaccaccatgctcagctaatttttaaattattttgtagaaacaaggtctatgttgcccagggtagtctcaaactcctgggctcaagcaattctcctgcctcagcctcccagtgagccaccatgcctagccccaataaaaggtattttttaaaaagattaagttgtagaagagtatgtatataaacttatttgggtaaaaactaagtatgtatatgagtatgtatgtgtgtggatccatacacagacagacaggcagacacacacacacacacacacacacacacacacacacacacacagagagagagagaaaatgcctagaaaatacacattaaaccatcaacagttatttctgggattataagggctaggagacattgaattattatattcttaccctgtttcaatgttttataacaaataagtattactttcacaagaacatttttaaaaaggaaatcataaaatgtgaagtattttacatatgttacaataatgaatataggtattagaaaatggctttaggccaggcatggtggctcatgcctgtaaccctagtactttgggaggccaaggtaggaggattacttatgcccaggagtttgaggctgcagagagctatgaatgtaccactgcactccagcctgggcaattagagcgagactctgattgtattaaaaaaaaaaaaaaagtctttaacaatgtggaagaacatactcaactgtattacttttttttcttctttttttttgagacaagtctcagtctgtcacccaagctggaatgcagtggtgtgatctcggctcactgcaacctccacctcccgggttcaagcaattctccctgcctcagcttcctgagtagctgggcttataggtgcccaccaccacgcccagctaatttttgtactttttagtagagacagggtttcgccatgttggccaggctgctcttgaactcctgacctcaggtgatccacccacctcagccttccaaagtgctgggattacacgtgtgagccactgcacccggcctttacatgtattacttttgaaatcagtcaaaagaataataatacataaaatttcctaccccccacccccccgccatgttctggtttccaccccatgttctggttttccccaatcctgaaagttctgagttcaagtcctggttccatcactgactgtccatatggccacggtagatctcttgatgatttgaatctcttttctcacctgaaaagtgagagtatcatgcctcctacatggctactgaggtggccttatgaaataacacagtgacctggagggccctccaaggcaggacagggctgttgctgttggggaggcacacatttcataccatgtaacctggtccactgccaccccacttcgtggacccaacaaagctgtgcatggcccatactcctacacacaggcatgaggggacaaccaggatcaaggtaggtgttggagtaggaatggttaagggacagtaacaggtcagctcagagtttgcagggagtggcagccttgtgccaggccaggcactgagacaggcctgcatgtcccaactgtaggcaggccatatcactctccttgtaaatcttagtagacaccacatggtccccacccaggatctacagcctcatcctagcaggcactcaaatatttgctgagtgaggatgggcacgcatgactgactttggtcaactcccagctggctggtcaccaacttttctttgtaacatattctgggccccacagctgcatactcatccctggagccacctcttctcaccttctcctacacctatgcacaggaatctcagtacaccaaggtggcatggcagaaatcagcagcttcccctggggattgtctactgagcacctacagaaccatatgggtctaccaggactgggacagtggcccaaaacatagaggttcctgatcggctcaggaactaggcagaaagagaatcaggtcctgagcatacctatatggccatcctgctaaaatttctcatggtccctgtagaagctatagactttcacctaaccacagagcaaccttgttgtggctagttctgtgcctctgtccctaccctgaccattcttttctcctgaccagaatccactctctagttttcaaagcatttcacatctatcgctgcattttatcctcatgccattttacagatgaggacactgggccagggacattagaggactgcctaaggccaggacaccacgcaatgccaaattcagacttcctaacacaatattcagcactctcttcattcttatgtttttctattaacatgctgctttacaaaattaaatacctggtttttgtcttccctcaaatttatcgtgcaatgttgtaacttttgtgctgtttgaaatgagtacagagtaaattaatcactcatccacttattcattcaaccaaccagcagttttccaatgccaattacatttgaggtctggtgctaccaactgtggaggagttacaaagaggaataagaccaagttgaggtcttggagtctagtacaggagctgaaggcacatagattaattttaagaattctaaacaaggggctccatcaaactcacctgtttttcctttcgttgttgtttttgcctgtttttcttaaacaaagcatcctctcaccccacgaaagatctggttcccagatcccttcagagatttaaataggatctggacctagatcaggcctaagaatctgtatgcttttaatgtagccctcactttctaccctagatgattctctaattaacagagttttggaaacccagctctagaagagggtacagctctatcaatagcacaaagcaataccaacaaaatacagtattttagaaggacagaaacctcagggcctatccagctacaatccacagggactacagagaggtcagataaacttggggggtaagggacaaatctgctgaattcagattaatcagcatttagtccaactggaacacagctgatcattttaagaaataagttcacacctagttttaaaaaacagtcctaactttgagatgtccagggcaacacatgtggtgctgggactaacgcggatttgcaatacttaatgatcctgtaggaacacagagcctggcggctgaagttgactgacccagtatcttcaatatattaccttcccagagctggcctttggtctacttggtctggcccacctcacaggaattgagcaagaaagagaacacgagagttgaatatccctgcaggaaccaccagggaacttgatc

SEQ ID NO: 346 - DNA, 467 bp, Homo sapiens
tcttaactcttgaagtataataaataatctttgctggcaggactatgctgaacctccttaggcactctctaattagatgtcctaggtcctcccaattcttagtccttttatatctgtttttctccttctcttattccatttagtttttcaattcatacaaaaccgtatccaggccatcaccaatcattctatacaacaaatgtttcttctaacgtccccactctaggttcccacgccgcccctaatcccgcttgaagcagccctgagaaacatcgcccattctctctccataccaccccccaaaaattttcgccgccccaacacttcaacactattttgttttatttttcttattaatataagaaggcaggaatgtcaggcctctgagcccaagccaagccatcgatcccctgtgacttgcacatatacgcccagatgggctgaagtaactgaagaatcacaaaaga

SEQ ID NO: 347 - DNA, 569 bp, Homo sapiens
  misc_feature (475)..(555): Each "n" represents a nucleotide selected from a, t, g or c, or contains no nucleotide.
gtgtgagcaacatggctgtttatttcacctgggtgcaggcgggctgagtccgaaaagagagtcagcaaagggagataagggtggggccgttttataggatttgggtaggtaaaggaaaattacagtcaaagggggtttgttctctggcgggcaggagtggggggtcgcaaggtgctcagtgggggtgctttttgagccaggatgagccaggtaaaggactttcacaaggtaacctcatcacttaaagcaaggaccggccatttacacttcttttgtggtggaatgtcatcagttaaggcggggcagggcatattcacttcttttgtgattcttcagttcttcaggccatctgggcatatacctgcaagtcacaggggatgcgatggcttggcttgggctcagaggcctgacattcctgccttcttatattaataagaaaaataaaacaaaatggtgttgaagtgttggggcggcnaaaatttttggagggtgacatggagaganaatgggcgattttcccagggctgcttcaaccgggattagggtggcgtgganccaaaatgggaaaa

SEQ ID NO: 348 - DNA, 12461 bp, Homo sapiens
gatatcctattaatacagagatacagaaagaaatacataaaaaatagttttatcaaatactttccagcattcaagtgtagcctcaaaagcaagaataggccaggagtggtggctcacgctgtaatccacagcactgtgggaggccaaggtaagaggattgcttgaggccaggatttcaagaccagcctaggcaacatagtgagatccctatctctacgaaaaaattttaaaacttagctgggcatggtgcttgagcctgttgtcccagctactcaggaggtgaagtaggagtgtcacttgagcccaggaggttgaggctgcagtgagctataactgcaccactgcactccagccttggagacagagtgagaccctgtccccaaaaaaattaaaattgagaaaaaaaaaaaggcaagaacagccacagcaaactttctattggggaaaaaaaaaaatcctcctctttacatctctcccttccttcccttccctttctgagagtgactgtggccaaaaggagcattttccccctgcagtcctctgaggggtggggtggggctatgaagctatccttcatattcactcctttgtccagctcttttcacctctagttcttctccccgcatctctgtctagcagtgccttaagtggaggaggggtgggggcatcaagcttgtaaaactggtttgttggggttctccttctcccctcatttcttgattcttgggaaaatgtcttgctgggaggctgcctggcgagtgccctagctgccttctgtgggcttgaatggggcttccctctgcccctacaggaggaaaagggagctgctgccagagggagaaatggagagatggacagagaaggcaggtgccacccctcgcccctgacacacaaagaaaaagacacggaaattctctctctctcttctcttctcctatctctctctctctccctctctctctctctctctctctctctcacacacacacacacacacacacacacacacacaggcgcgcgccgcgcgcgcaggcacacgtcttgcaaattcaggattcaaagagacaggggcaccattatatttggcacggtggggccttccaggtctgaaatcctgcattcttccttactatttactttccccgagctcgagaagggccaggtgtgggcggatggctggccacgttttgtgtttccaattcatattcacgggatgacacagacggggcgtggtgagtgctgttggaggcgcttgggcagtttcattttgccccacttctccacctgaaggctgggcgttgctggaacctgcaggggcagcctcagcaaggtggggtggcgtggagtggggtgggagaagggactccagctgaagtagaacccaggctggacctgagaatattggggagggcatgggcggtggtttccgggtaggggccttgaggacatgttggtcctgactgttgtcagtgtttggtcaaagttgccaaaaggttaaaaaaaaaaaagtagggggagtccctgccaagacatatttcccaggccacctttcttccgcgggagtgttgggggggaggcgctgcttggaacctgtgaatgtgacatcagctctcctctcctctcccaaggtcggctttggagagggaggtcagggcacccttgcctggcacaggcacgctggcttccggctcagtgccgcctgctctccgggagctgtgcgctccctgggccccggggctaggctgaggtaagcgcacagcggaggccaggcgcgccggcagaggcctgggggatagggtggaggcatctctgggtgtgggtgtgggtgtgggtgtgggagggagagttcttgcctctctctctcccatctccaactcttgcttcagtggctcttttagaggatgcatgtcattatggacctgtcgctgccactgtccctgttcccccagctgtgacttcgagggaggtctggggatctgagtctgtccaaacccacggctttgctgttgggataaaaactgtccttttgattttagaaggaggagggaaaaaaggtttcccagcatgtgtgttgtgccagtcttggaaattcatccgtgcttgaattccaccctccatccccagaaaaactggagtaaaacaaaaagaggagatggacaaagtgtgtatttgatggcatcccctgggaagagactctaaatttatcccataggtcttactgggccactgtgagcgctttggtggagaacaaacaaaaattctgggtgctcagttgtctaacctgaaaaatgggactagcggaaaaagccaatgtgttccatgcaccttttgctttctttattaaggcatgatgtcacctgtacagtaactgccctgtgtgtacttcagggggggatttcaaggttagatagacaggaaattgttttgaaaatgtaaacacattattaaatgtgaagtattatctgattccttgttcgaatggcatttccttctcagcaccaccttccttgcatattcacttaaccttgtacaagaacacctttttgccctaaatgaagacacccccccaaaaaaaagagtcccagaaaatatgtccctgcttgtgcgggaataaatagaatattctgaggtgcattcctccttcctatgttaggcaacattccttgaccctcctcggcccccaagccaggttgcgtttttttctgccatttagaagggttttcctttttgtcctagtaaaacatcagcccctgtagctcttcatctccccctggtgttcttctcccgccatgtcttaagattggtggcaccgaccaatcttaagatttaagttctgtgtgaaaaacacctttgcttttcaatcagtttatcagcctcctccgcaggggaatgtggacacacaaaagaacttatcggggcttctcatcagtgatagggaaaagactggcatgtgcctaaacgagctctgatgttatttttaagctccctttcttgccaatccctcacggatctttctccgatagatgcaaagaacttcagcaaaaaagacccgcaggaaggggcttgaagagaaaagtacgttgatctgccaaaatagtctgacccccagtagtgggcagtgacgagggagagcattcccttgtttgactgagactagaatcggagagacataaaaggaaaatgaagcgagcaacaattaaaaaaaattccccgcacacaacaatacaatctatttaaactgtggctcatacttttcataccaatggtatgactttttttctggagtcccctcttctgattcttgaactccggggctggcagcttgcaaaggggaagcggactccagcactgcacgggcaggtttagcaaaggtctctaatgggtattttctttttcttagccctgcccccgaattgtcagacggcgggcgtctgcttctgaagttagcagtgatttcctttcgggcctggcttatctccggctgcacgttgcctgttggtgactaataacacaataacattgtctggggctggaataaagtcggagctgtttacccccactctaataggggttcaatataaaaagccggcagagagctgtccaagtcagacgcgcctctgcatctgcgccaggcgaacgggtcctgcgcctcctgcagtcccagctctccaccgccgcgtgcgcctgcagacgctccgctcgctgccttctctcctggcaggcgctgccttttctccccgttaaagggcacttgggctgaaggatcgctttgagatctgaggaacccgcagcgctttgagggacctgaagctgtttttcttcgttttcctttgggttcagtttgaacgggaggtttttgatccctttttttcagaatggattatttgctcatgattttctctctgctgtttgtggcttgccaaggagctccagaaacaggtaggcacgctcgttgacttgtaagtctcggaattacaagttagtgtgttcttatccaccttcatgcttttcttgcttctatttttccccgttctttttatgactgcagcttagagagcaagtgtctgagaattattgctgaaacgtactttaagtcttctagtgtaaaatgtaaaattcctctactgaatacaattaggtgcaattgactataacatgacattaaaataacttatcgttttattattattattccattatgtgtttccttggcttttaaaaaatgagaagagtatggacatatacaatttagtcaaatgtatgtttgtaatatatgtgtttatacaggtacacaggccatataggaacttaaatcttatttaaacactattttaatagtgtgttaacgtgtaaaatatttaagcattccagcttgaagccaaggaattgtatccagtcgttcaagcaatgtatgttcagtaaaatcacctgcagagcaaaagtctgttgactaactaccgcctcccccgcccccccaccaccccccgcaggcggtttctgggtgaagcagatgttttctttaaaatttgtcatcattgactttaggtttcttttggcaggtttttggcacccaaaacagtgtgagctctcttttcagctttattcacctgtgctgggaggggagctaggataattcttggctgccgaaggatttaggcagtgcgtgtgcatctgcccgggtcccccccgtttttagggtcagtgcactttttttgtcttttcgtgaccctgactaaagagaaaggatgtcaagggaatgaaaatcctggaatgtgtctgatcatttgaaatgtacaaaattgggcagataagctgcatggctaaattgttaggaggaagaggcaaggcagtagtggagaagggggaggcagtggatcccacacaagcctgatgcccagggattcggaattcaaaatccccccagcctaccttcagtcccctgacctgcttctcagccccaccttaggtcactggtttctatggagttaccctactgaattgaatattgaatagttaatttctctctccaatcattttccccacctaattttgaaagatatacatcatctggggtaccctgtgccctacacagcatgtgaagtggatgggtaccccctaaagagagggtcatcctgaatggggaagtggccccaaagctaggaataactgtgatttcttgtctttagtcatgtgccaatgttaagtaagcttcagtggatagtgctgtcctaccaagttccttgtagaagccagccggattttcaacaggcagcattccacagcatttccctgagcctgcttcaagaggggtgggggaagtcccttttcaggtgtttatctcctctgcatttgtgtaatctccctgaaggtggataagccaagggcatgagggggaggcaaaaggtgaactcatgttaaggagggaaaaaaataaagagcccttttttctgtgtttcttgctgatggcaggctgtgtgcttcatctgcttttatctgctctgctagctctgactctactgtgatccagcatgtctctcggcgtttgaggagacatcccccactgacctgctctttctctccccagcagtcttaggcgctgagctcagcgcggtgggtgagaacggcggggagaaacccactcccagtccaccctggcggctccgccggtccaagcgctgctcctgctcgtccctgatggataaagagtgtgtctacttctgccacctggacatcatttgggtcaacactcccgagtaagtctctagagggcattgtaaccctattcattcattagcgctggctccactggagcccagttttagagtttcttttctagggactctgaaggtagtccttctaacaccatccaagtgcctcagtggggacagtttccctctattcctgaaaataacgacagcttcgttcttagcaaccaaggggagggtcttctgaggccccgtagctcaggctactcatgatgggacaagcaggaggccactgcacgtttcaaatgaggaactttcagtgagagggcctcagggggacactctcacagtggcatctgatggggtttcgggaataattgccgaggtcagatgtgggttagtgcaacctgtgcttctcatgggagggtggagactgagaggcagaagtgatgatatagagggttagaatcacttaattttagttacagaaaaacctaggctcaaagtgttgaagccatttgtgcaggagtgagtttgtagcagagctagaactggagcccggatttcctttgctgctatattttccctttagaaatgcccatttcagaactgaaatagaaatactgtccataggcttctctttcacctacagagaagaaaagcagatttcctccttctgccctggacactagttcatcatctgtcggaagcagtcataaacaagcacacatttactatgcatacaatgtaccgttatgacaaaggaggaccaaaatccaaacaatatcaaaccacaccaaaaaccacaaggagcctaataattactaaggtgatacttccaaagggaggactttatttcttagatgagaatgaaaatggacacattggaaattattggagagccctctggctatgagtccttccacaaccatatggtaccaccgactggcaggagaaatgtgtgaacatgtgcctcctctccccaaccactggggccggtggggtgacggtggcacttttagcagtatcctccgtggtttgagttgaaaataagttttaaaaatcctgtgagtcatggttttgcattgaaacctcttcccactgtgtacccacaaatagttaactaaatagaccattagaaaaggaagaaaatataaagcagatgccaagcagagatgtcctaatttttgacaaaaaagcaatgttgcttgtgtcaagaagaaactgaactttgtgaagagttgaaatggaattccactgaattagaaaaacttgttttctcctgcctggatacatacagtcagggccattgatgcacaggtgttcctggctgttgttacactttaccctctgaaatgatgctcccaagtgctatgtgatgagctccttgtgtgcccagtggaataggtgtgtccatgtgtcattttaaagactattaattacactaatatagtttctttctctctttggataataggcacgttgttccgtatggacttggaagccctaggtccaagagagccttggagaatttacttcccacaaaggcaacagaccgtgagaatagatgccaatgtgctagccaaaaagacaagaagtgctggaatttttgccaagcaggaaaagaactcaggtgagcagaaacacctttgcttttcaatcagtttaacagcctcctgaactccttcctatcatggtactgccttcctgttttagagagactaacagagacattgaaagtcagggtaaagctgaatataacattgctgaaatgtttttccttgtgtattttaacagggctgaagacattatggagaaagactggaataatcataagaaaggaaaagactgttccaagcttgggaaaaagtgtatttatcagcagttagtgagaggaagaaaaatcagaagaagttcagaggaacacctaagacaaaccaggtaagagggaaggaagaaaaattaggtaagaggttcacaagaacaactagccccagtcagtgatgccagcagcctgttcctccagcccttcttacccgggcaggtgaaagacttagaaaacagtagcagaggagatctatgcatcctatagattaaaaggagcaaaagaatccctcttaaatatttccatgaagctctggaatgcaaaccgatgtcctctgtacctttagcacataccatttcatctacaggtagatttcccaaccaaaatatatccagagatgcctttgtcattgggttatatacagcctttgcctctctgagtcaatgtatttaccactttccctgagaaatcgaaaatcattttggggagcggacatttagaaaaagaatcaaagtgtcatggataatcaaattcttcaataagttgcagttattcagatggccaaaggaaaaataaagtcattagatagggttggtagaatttagaacatgctgtttttcaggtttatggtctttttttttttttttttttttttttaaatagggaaatgtgtttggtgcagagccaatgtcattccaaaaagctctctcttttcctggtcagtcatgtgctgggacagagaagggatctggattaggcaacatcatagagttgctctgagctgctctttggtgataacccttccaaatcctaaactttttggaattcacaagctcaaaggaggaaacctactctctgatctaccacatgttctgcatttttctatcatggtctatggaaacttctcttagaaatccagtggcaagaagttctatgattaaagtgttctgagctcaggccaggcagtcatgaactacttctgagttgtttactactgatttgtggggcagcctcagctatcggtttcttcacacctgcttatgagagtatccatatttatggtcgcaggcagtaatgctccccacgagatcagtttctgaactaacctggaattttttatgggtttttattatgccaactattaaatcaacattacagttcttccctctgtatttctcctgtaaaacattaggcctgcaaaaaaaaaaaatctttttaaaaataattgccataaagtatttgctctgggcctactgtatgcttcttttytttttctctcttttcaactaagtcaccgtcaatttattaagatggccataactattcaaaacctatgctgagttcctcaaggcagggtcgcatagtgatgaaggttgggatggggctacggaagaaaccagaacaactctagtttatttaaaacctgtatttactgcccacttccccttagacttgaccatatgaccccttgctccccattctaagcataggggcaggctttatttttacaatggtaatagatgatatcacttgaggttttatcaaagagttgcggcgggtggtgaaagttcacaaccagattcaggttttgtttgtgccagattctaattttacatgtttcttttgccaaagggtgatttttttaaaataacatttgttttctcttatcttgctttattaggtcggagaccatgagaaacagcgtcaaatcatcttttcatgatcccaagctgaaaggcaagccctccagagagcgttatgtgacccacaaccgagcacattggtgacagaccttcggggcctgtctgaagccatagcctccacggagagccctgtggccgactctgcactctccaccctggctgggatcagagcaggagcatcctctgctggttcctgactggcaaaggaccagcgtcctcgttcaaaacattccaagaaaggttaaggagttcccccaaccatcttcactggcttccatcagtggtaactgctttggtctcttctttcatctggggatgacaatggacctctcagcagaaacacacagtcacattcgaattcgggtggcatcctccggagagagagagaggaaggagattccacacaggggtggagtttctgacgaaggtcctaagggagtgtttgtgtctgactcaggcgcctggcacatttcagggagaaactccaaagtccacacaaagattttctaaggaatgcacaaattgaaaacacactcaaaagacaaacatgcaagtaaagaaaaaaaaaagaaagacttttgtttaaatttgtaaaatgcaaaactgaatgaaactgttactaccataaatcaggatatgtttcatgaatatgagtctacctcacctatattgcactctggcagaagtatttcccacatttaattattgcctccccaaactcttcccacccctgctgccccttcctccatcccccatactaaatcctagcctcgtagaagtctggtctaatgtgtcagcagtagatataatattttcatggtaatctactagctctgatccataagaaaaaaaagatcattaaatcaggagattccctgtccttgatttttggagacacaatggtatagggttgtttatgaaatatattgaaaagtaagtgtttgttacgctttaaagcagtaaaattattttcctttatataaccggctaatgaaagaggttggattgaattttgatgtacttatttttttatagatatttatattcaaacaatttattccttatatttaccatgttaaatatctgtttgggcaggccatattggtctatgtatttttaaaatatgtatttctaaatgaaattgagaacatgctttgttttgcctgtcaaggtaatgactttagaaaataaatatttttttccttactgtactgatttggaatcattactgaaatttgtaaggagtgggccaacgtgattaagtaccataaaggcaaataaatggttaaagacggtttcatagaaaagtgacaattagaaggatattacggtctaagctaattatataaagaattttatctgtatcttaaatgttgattttatactgcattgaggtaaaaacacaaaacaaaaaagcagctttaacacctctgtcttctcttgggtagcagcctcctgcttctccttcacctgaaaaattctccagggacttcatccattaacttggctcaggctattggcaggattcacagtttaagctgatggtgtggtgagagatgctttatccatattaatggactgaaggaagtaatggcaagacaaccccccaaaacatacctaattatacaaagttatataccaaagttgcttttagaaaatggcctgctcagagcaagtagaggtttccaatggctttttattttctcacattaaggatgttgtttcttaaggaacattgagtaccattgcttcttcgtgatagcctaggactgccgtgtgcccatggaggtagagacaccaggtactgattctaggtcctctgccacaaagcaccacttcctctccactttgccttggctggccttgtcagctcactggagagcacagtattgcaattgcagtattgcaaatggtcactactaactgaattctctaagagcttgattagccctcgagaatcttccttgcccttctctaatagtgtctgaaggaattcctggcatttaacaaatattagcatgtagtgatcactgtcgtcctaacagtgacacatcagaaggatttcaaataacagtcttcaggcatgcgtaatcaatgtcctgtgcagagtctccgtcctcattgatcctcatttttctctttaaggcacagtccaatgtctttggggaattgtttataaagcttactttatccataaactgtttctcagtgcgtgactctgaagaaaattttgaagttttgcccatgttgacaaggtgcttggtctgaacttggccagtatttaatcttgagcaaacgattcaatttccttctatcgtgagttttctcatctatgaaacaagggagttgaggggagtttctttcatacctctgagaaagagtttgagattacataaagaagttgaagtggcatgaaaaaaaataaagatctgagcttagaagacatggatctaatacatttaagaggaagtcagaatcagagaagccactgaacaaaacagtccaaacggagcatagtaagtcagattgatgagttttggttgggtttttcatcagtcaaacccttgagcccccctttcccatgcttcctgcttcagtatccagtaggaaaaatgaaagggatgatgtagacactctagggcatgaggatttgcagtaaataagttgggagactcacagaaaattaatatttttcaaacatgaagacgaaacattcaattatattacagtccacatcagcttgaagggtaaactgatgggatgatctgtcacatttcttgctctgtttccagtaaaagcatggtttctggaaacccacttaggacagctttctctctttacactgatagcccaggcaagctttgatctcagaactccagaaaccagagaactctaggtggaatgtggtaacttttgccagggcagagggaacacctactaataggtacttcatttgcaccaccagagattggcatcttttttgatggatccactggctttgatactgcctgtactcccccaaaacacagcttgggtattggactaatctagagctccctcaggagaactcttgctgacattaagaaagagcaacattttgtctttccaggtgaaaatccaaggccaaaaagggagtgactcacctaagatcacagaaggagctgtagcatctctggagcctgaacacttaagttaagcacgactatttcacgcagagggcatgaattc

SEQ ID NO: 349 - DNA, 481 bp, Homo sapiens
gtgcgcggacgcgctgcgccctactgcgtggcggaggtcgccgcaggccccagcgcgctgccggggccgtgccggcgaggatggctcagggacgcggtcacctcccgccgcttgcagcagcgccgatggacccaagccggggcacgcgccggcgacgacgacccgcatcggctcctccagcagctcgtgctctcgggaaacctcatcaaggaagccgtgcggagactccaacgagccgtcgccgcggttgcagccacgggccccgcaagcgcccctgggcccgggggaggccgcagcggacctgaccgcattgccctgcagccctcaggctccttgctctgacgcaggcctcctggaggaggaagtggaggccgctgcgtagacccaacagcgtccagttcctactaactctgagctgaagccgacgtcgccagcctgggagcgaccactttggctgcggggaggcgcgtggggagagatc

SEQ ID NO: 350 - DNA, 782 bp, Homo sapiens
ctcgaagacgaagtcctcggcgcgttcgccgtcgctgcacacgctgccgtggctgcccgtgtaccagaaccctccgtcgcggcctcggatccggtaggcgccgtcgctgaagctcaggtggaagacgtcgtagacggagcggttggtgtccagctggttggagccgcggtggtggcagacgaagccgtccaggccgcgcagcaccaggatgggccggttgatgagcttgagggtgaactcttcgtccttgcctggcggggagagcgtctgctgcgctgcccctcccgccaccttccctgtccaggccgggcggggtgggggcccgacaaaatcgctgatagccgccagctgcccattcttcttcatgcacacgtagcgcccgttgctggctttgagtgctacccgccggccacgccactccatctcaaacatggtgttggcagaaacttgtgtggctgtggcgtgaatgccccatgggtgaccagggtccagtagcccccagtgctggaatagaaggtgcacttctttgtctcctggtcaatttgcatcaggaaaggtctcgtgggctagttcatcatcctgattggctgagacgttgacccccttgccgcacagagaccgtactggtggttggcagccaccagcaccacctgggggtgactctccctcagacaaaaagctcatccttgcccagttgcgtgtttcggccggccttgagggtgctgcgggcccccggggtgcaagtaggtgccggcggagtccttgaaggccgcttggccccc

SEQ ID NO: 351 - DNA, 655 bp, Homo sapiens
ccatggcctcatagaggctgatatagaaacttctggattcaaatgattgtttggaggcattagcaggcattgaaccaattataaagagtgaggttttggccatattctaaccgtaagaaacagaaacggtagagggtaaaaatagaatagaatgtcaatacaactttagccttttccctggattctgagagttcataacctgaaaatcagagattcaaactgggagagatgggctaacaggtatgagcatgggaaaagcatgtttcaagaatttgagatgtatttcccagaaaagcaacatgatgaaaatggtcagaaaaggcaatttccttcctcttttctaatttggctctggagccaccagcagaacctcttcaatatcttgcatgttacagatttcactgctcccaccagcttggagacaacatgtggttcttgacaactctgctcctttggggtaagttggactcagaggggacagttagaagggtacaggctgtggctgttgtgagtcaagagttttgtcttcctgtggtaactctgggtagaactcatgagtatgaagcaacttgtatctgtgcttccatggtttattagagcttattttatgaaaaggatgggaagggcaaccctgaggtagcattaagcctggacg

SEQ ID NO: 352 - DNA, 96256 bp, Homo sapiens
gatcatgaggtcaggagttcgagaccagcctggccaacatagtgaaaccccatctctactaaaaatacaaaaaaattagccgggcgtggtggtgggcgcctgtaattccagctacttgggaggagaattgcttgaacccaggaggcagaggttgcagtgagccgagatcgagccactgcactccagcctgggcaacaagactgaaactctgtctcaaaaaaaaaaaaaaaagcttgttatgctcacagtctgaggagggaggtcaccattagcacgtggcacagatccaaaggtggttacaaccagccgtggaagcagagagaggcttcccacggaagaagtacctaggctacacgctggtgaagaatagatgcactttggtgacagatggaggaaacagagttccaggctgaaggaatatatcagagcaaaggtgtggaggacagaacacaggatgcgtggaagaatttaataataacaatagcagcgaacacttcctgggtgctttccatgtgccagacaccatgctgagctccttgccctaattcttattttacatcctgggaagcagctcccaggaaaggcaagctggagccaccctttggagggcgtggaacagaggcgtctggttttcctcccatgggcaggaggaccactgacaattaagacgtcaccaaaatccccatcatggtagggttctgcctgtccctggatgagaaaaggtgaggccttgtggccaggctcagagacaaatggaccccaagtcccctgccagacaccttggcctggaggaggtggggagaccaaggtcagcaggtgtgctggctggagaggcagcggggcgaagcatctccatccaccccagcagctgcagcccagacacagctgcactgccccctgctgccagcctggggagggcgcggctgcaaggacctcccacccaatcggcactgctggggaacagccccgccctctcaggtaagacacagagccaggccgaggggctggacagatgcaggcatgggaggcatcattcagtgccgcatgtcctggctgcatcgaggtggcatggaaagggggcaggcctgagacctggcctggctatgctggccctggctttgtggctggagcacacggtccgctccaaaccccagggcaaactgcaccctagcctgggcaaatgagccggctgctgagcgtcagttaccacatgcataacacgaagctgacaatgacaccccttgccctctgtgggtgctggggggtggggggggggggcacatgaataaaagataatgcagggagaggtggaaaccagaggactctggggcctccaaactgcaggcctggcccttagtggctggtaacattcactgggttgcgactgggacagctggataatgctatggaatagaaagtacaatgctatcccccaccccgctcccgccaccccaggtaaatccaattattatctcatgacctttttgttccaggcatgtgtaccgggtttctctcactgtgggttgtggtcagatggtccgagaagcacagcacgcagggtgccagcaggaactctggggtcaaacggcccagctgctcagccgcttgagcctcagctccacccacctccctggctactcgctgagtttagacatgggcagctctcagaacagggcccaggagacactaagtgctctgtcaaaactagacatttactggcatcaggtgtgattcacaacaaatcacctctcgcttgcctcagtttccccacctgtttcaaacccacagacaactgaccatcatggcctctccagaccagagcccagtaagcagctggcatccaggctcttccaccaaccctacccaccccacccacctctactcgctccctcctccacacctctcccctctgcaatgcaagcatcaaggctgacctcagctttcaactcaggtttttcaggctcttcttgacaactcctgcagctccctgaagacccagctcaggcgccccctcctccaggacgcccttgccaacctcctcaaaggaccagtgacttctctgagcctccacagaccaggaatacctgctcccagcactcctcggagtctgcagagcccacaggggcttgcccagagcagggtccagatagggttcctcccagccccccgcctcagcagacaagcaggaggggtagagaaaggacacagcagggagaggggctgcctgctccccgctcctgggactggctgaccagctggctgcctgtgtggtactaggaagcacagtgtccttagctaccagctcccagccccctccccagtcaggtcaggtcacaggcagacaggaacggggcaagtctgccagctctgccagctctgagcagtgacaggccacatggcctcaatgaatgtcccccagggccccgtgggaagatatctgagtagtctgcgtgcctgcttggtaccaggtcagggacctgatgctgagactgaagcatgccacacagatcacctcagtcaatcctcctgacaacccgatggttgagataagggaaactgaggcacaggaaagttaacttgccaagaatgggcacagctagtgggccgtggagccaggcaatgacttatgggaaccctctctttgcaaggacagaaggtgccagagatcccctggggccacgtgagcgagctgggcagtggtgaggctatgctggggagacggcaccccgaaaccctccagtgctctccatgctctgcctctctcacccagcacctcacttgccccatgagttctcccttgctgtcccccacctgactatctgtcagcccaacccccggtctgccccagccccccactatccaccatcccctcccggcacccaggctccaggagctgagaagggcagggcagagaggctgagggcaagagatgggcaggaaatgggaaagaggagagaaaatgcccaacatggtgcccagtacaaagtgggcacacaatacggatgtgagatctccaacagctgagacagtggggaggcacatcggaatctccaaccagctccgaggggcctgtgacttgggaccaatttctaactgtctctgtacttcagtgtcctggtctgtgtaacgaggttaaaattccagccttgcagagctgctctgaggattaaacaacaatggcgacaataatcataactaaccgcgagcatatgctgacatccaccgtgagtgtgctaagcattctagaagggatactcaaacccccatagtgaccctaagggacaggcactatgtgagcccattttacagagcaggaaactgaggcactgggaaattcagagacatgcccaaggtcccacagtagcaagtgctgacaccaaagccagctcttcccacctcgccataacacaatcccaggagacacacaagttgccccgacctgggacctgtccgggccctcatctccctctccctctcctctccgcctgtctgcctctctctctctctttctctctctctctctgtccaccacctctgcaccttccccagcctgtgttcttccccaggaacctctctcctccccaggaacagcatgggcagcagaagtggccccatgtgatcgtggggcctgggcggggctgggacggaggctcctgctccctggctgcatcctggcgccccctggacaacagccaggacccctgctgcagcccaaactggaggaagggaggaagggccgaggcgagcaggaagggaggcgcctccaccccttccccgagaagcacgtcctgcacaggcaaaaacaatgtctcgctgagcccactgccgggggccaggtgggggcagggcctggacactggctgaccaagccgctccggaggccagaggccctggtcctatgctgtacccatctgctgcgtgacccatccctctgcacccaacacctccacattccagcgctgacagtccatgtttcctatgccctttccaaaacccaaatctgatcaggtcactatgaacccagacctggtacttcccaactgtgggaccctgggcaagttgcttaacctctctgagccccagttacctcctctatggagcagagataatcgtcattatgcctactccctggacaaagagcatgttgtaaaacagccagcagctggccttgcagttaataactaaaccctcccacatttcccagagtgtacaagccaaagtccacactttcccagcctgactcaggaagccttgactttcgcccttccccctcgctcctcctccacagtcaccggatgctctccctacctgccctctcctcacagctgagttccaagaccacaatggccgtgcagcccccgctctgccccacccctcccttagatacactggcaggtgtgaacagcggccacgcaccggccacactaacagcacgtcgcctacagtgcactctgcactaatgggctttgtgactcctgttatggacctgtggctggcccggtcacaggggctcctgaggtgacccaagcccacccacagcatgaaactttgctgggtggctcagtcccagggactcagagccaagggactgacaggcaggacattgggacgaggacagcttgtaagtgacaactattactaagcacctgctacatgcctggcagagctgggtgctttgcttctgcgagcagagccctcaaaagacctccatgcaaaaagggtcatcatctccctttagctactgaggaaatggaggcccagagaagtgaagggaccagcccaagtcacagggacgatcaagagcggcagcaggattggaatccaagggctgccagtgtctacagatcttaatcttccaatagttgcataaaacaggggcgaggcaattgctcctcccacctcactcctgttcccctctcaagcaatcaccccagctccacccactgcaggcagctacagtacctgttgaggaagtccaggccacagccccgagccaggaggccttccggctttcccaaaggccacacgctgtcagaggatgaggacgaagagaggccaggggaccagggcttaagtgtcacactccctggggaaaaagaatgaggttcagggatctggcactgggaaacagggatggccagggtccatgacagggactgacccccctccagcccagagaggccttggcaggtttgaggccccaggagcacatcagacccactgggctcagagataggtcagggcccaccaggctgaccccgcagtttcccagaagagggtgaaaggtggcccagaactgaagagcctcgtacatcacagccgggaacaggagtgaggcccaggactgggctcggggtgagaggctggaaccaaagtccccagggtcctcccaagcacaaccttcctgcctggcaggggccacggcggggcttcagggaaggggatgcaggccaaaggtagcgcaggtggtgcaggcttcaggtgggctgcaaagccacctcccccgaccagaggagccctccccacggaactcaagggctgttacctgtgatgtctgacatgctgctgaaggatctgggcagagagagggcagggagggggcaggaggtgaggcacagtgggcactctgccccgctccctcctcctgcccccacaccagataaatgtctcacagcccccaagcaaatgcaggctagactcaaggcagggtcccaggtacagggcacccatgccacctggctcccctaaactcccagggtaagaagttaatgtcctggcctctgtccaatgttgttccacctacaatgccctggcatgcccttcaaagccagctctttcaatgccacctcctcctggaagccacccctgatctctcacccctcacctcaccctcacttgccacctttgtggtttgtgactcccaggtacgcctcctaaattaaaccatgacctcctcatcagacacctccttgggacagatttacgcagatcaaggccatactgaccacagcctcccagggcccagcctctcaccagtaaaggaataaatcaagggctgcttacaggggaaaagcagtgacaaggatcgcgccccaggaggcaggctatctcccgcccttggtcttgccaccagagggtgcgccttggtttttctggtccctatttgctgctgatgcccaaacctggggcctggctttcttgccggaggtccctgataccttgaaacattctccacgccccctagtcctgaaccatcaagcttctccttgggtataggatcttcaaggcttgacccccagtgaccctcctgccaggatgcttggctaggactgagttcgctctgcccatcggccttatcttaagcctgaccttggtcgcccctgtgactcacaggacctgggtttccagagctccagccatctgagggcaataaagggaagtgactgcctggacctgactttggcattgcagattctgggaggtggctgttcgggaaacggcagccccacctccctgggtgtctactgctatccccagccatctcacctcttagggggtgcggggtcttcctcacgctgccggcggaggatggagccggcactgggggggaagggcaggatggagagccgattgatctccttttcactgtctgtggcttcctcctgcaatgccatgacagggcctgggtcacccccactgcccagcaccatcccagtcctcagcacacctggtttgtgcccattccacaaatgagaagtagggcccagagcagaagagcgggctctgcaagattatagtgtgcgggtggctccccacgcctcctggcacctatgcctggcaaggaaatggttctgggtgagcttcagtaaagtacttggcctccctgcgcctcagtgtcctcacctgtgaaatggatccttcagaaagcactctccacattagtaataatgctatagcagtgtccccccttatttgggatggggcagttgtcttaccgagttgtgaggctcaggtccccccatgacagctgcctccccagttgcttctgggcctcccagaggggaggggaactcgctcaggctccaagtgctgctgaggttggagcacagggaatgggaggaggcacaggcctggaagagggagaggagaggaaggaggtgagcagtgctaggcccacgtcaaccacagtcctttactgagcacctgccatgtgccagcacagggacagatccctgtcctcagggagctcacagcctagaatgggagataaactgtaaaccagcagacatgtgaacaaaatagccccaagctgagacaatagcagaaggaaggtgcccagggcatggaaaacacacaaagaccccacccagcctgggagtccaagtactctccaaagaaactgtggtttgaactgagaactcaagggtatagaggcgctaagtaggtcaagctgggatggtccaggcagatcaacagcatgtgcaaaggccctgaggcaggactgtgatgcattccagttgaaagactggaacccacagaaccaggcgagaggacaagaggaaccccacccgcagggcctcttggccatgaaaagggactctgtctttaccaaacagcaaaaaagccactgggggttaaaaaaaaaaaaaagtcttggattaatgctgacttttcctatattcctccaggccccagtgcttcaaacaccaggcctgcggagctcactgtcaggcaactcaaaataagaaaacgcaggctgggcgttcgcacctctaatcccagcactttgggaggctgaggcaggaggatcccttgaggtcaggagtttgaaaccagcctggccaacatggtgaaacccccatccctactgaaaatacaaaaaaaaacttagctgggtatggtggcaggcacctgtagtcccagctactagggaggctaaggcacgagaataacttgaacctgggatccagcctgggtgatacagcaagattctgtctcaaaaaaaaaaaaaaaaggaaaaagcagagctcccggcagcagcctgaggaccacgatccaatttacagtgggtctgggactccagctccagtgctagctggctgtgtggccttgggcaagcccctcaccctctctgggccctgtgcgatgagaggattagaccagctggtctctgagggatgcttaggcccatgttagtcctgactagctggtctctgaggcccaggttttgcattctaacatgcacacaggcactcaggcagccagccttccccagttaaatgcaaagaccagctccaaactattcttagtgtcccagaagcaaccccagaaactcagagaccaacatgcccctccgcctgctcaccagcccacacccagcccagcctgggttcaagttcccgcccctaactgaggactcttcccacttcccccaagcttcctcccctggctgaggtctcccaccagggccggcacgttcccagccctggccaagagctcctgccaggaccccagccttcctgccaggacctccacaatcttgacccgctcaccttgaggcaggtgccaccctgggcccgctgcagctgaacctccagcagagccttggtgccctccaggctggtgagcgttgtcagcagctcatcccgctccgcctccaggccccgcacctgcttgcggtactggtccttctcgatgaggctctgtgagtactgcaactggatccggtcacggctctggatggcctagggttgggggaggggaggcagcagctgaaggagccaccttggcccagctttcctggcctatgacttggagaatggggacagtaaggagaatggcagctatcacttactgagcactgtgtgccgggccctgagctaaattatcagctcatttaaatatcttcacactaactggctaagttagatactattaatatcattattctcattctgcagactggggaaaccaagccaggagcgacagagctgggattcaaatcgggcagtccatctgcagaatccaggctctcaccatttcaccaagaactgaaaacttttccacgagacctgctgtgtgccaggggcttcactcccagcatcccagtcagtggagaagccaggagtcaaacccagcccactgcatccacagtgaagaccaggggctccagagctgggcccatggtccagacctgtcacccatgcctcagagagagccgggggcagccccataaaatgcagattcctggggcccaccccagaccacctgaatcagaacgtccagagaatgaagccccaaatttgcactttcaagcttgccaggggattctgagggcatttctaatatgcagacttcggctgggcatgggagctcatgcctttgatcccagcactttgggaggctgaggcaggtggatcagttgagcccaggagttcaagaccagcctggtcaatatagtgaaaccctgtctctactaaagatacaaaaattagccaggaatggtggcatgcctgtaataccagctacttgggaggctgaggcaggagaatcacttgaatctgggaggcctcagtgagctgagattgcaccactgcactccaacctgggcaacagagctagattcagtctcaaaaagtaataacaacaataatatacagacttcaactcctctagtgggattcacacctggttaaggacaaaaacctcctgcccttccccgctgcagatggaacctcacacaaggaggctcgggggcctggtggcactggccggaggtcctcagcccaccccacaaccttggcaggagacaagggtcatagtgcccagggactgaaagccaaaacttttgagaatttcttcatcggcttctatttgtaagcactccctctgtgctggccttgtctttgagatggacagaacaagggattcaaaaatgaagacaccaggaccagcttctgtaactgccacaggagctcagatgaggccagtgggtccagggtgtaaggctggtatctcaagggctccaggtctcctgtctggttcccccagcctttgtgccccgtcctaacccaacagggagcggctaacgtctctttctaccattctagtcccctccattgctccttgtctcctcccatatgggaagcagcaactggcccagggcctcgtacacgcaggctgggctcacctggtctcgctccttctcaatctcctccagttgggccaggacagtggccatgcggtgcttgtacaggtcacagtccttctgcagcgtgcggtgcttgagccgcaggtcttccatctcctgcaggtactgagggtggcacggggcggggtcagaccacagggctggggaccatgagaaagctaaccagcaggtgcccaggagggccagtgagagacgctcaccaacagtctgagacccaataacaagtcccctcctgcccagtggagtggtctgagccactgactttacctcacaggccctcaactgcctaatctgtaaaacgagaagaatgatcatcatttcacccatccggccacccttggcctccccactcaaactgcaaccggccccttccccagctctgcatctcccacggtgctcatcgcctttgactacatgaaatagctgacgtgggactgtgtatctcacatactgccagtctcccctgctggagttccccctcaaggaaaaggcacctttgttttgctcactgcggcatctcaagcgcctagaagggtgcctccgtcaacatctgagaacaaatgaatgcagttctcagcgcggcgcctgcgtcaagcagatgctcagggaaggcgtgagcacacaggccctgcctgacaccctcccgcacaaggggcagggcacgggcagggccccacctggtcgcgcagctcctcggcccactgcagctccccctgcacggcatgcagcttctggcacagctcctgcctgctgtcctgcgcctcccgccagtcatgctctaggatgtccagcaggatgcgctcggagcccggggcccccggccggctcgcctcctggggatcacagggcagggccacctcagggtctggctaggggcccaccctgggtgtgggaaggaaggggacacgcagctctcagccctccaaacccacctgaccagctctgccatgctggcccggggcctcgaccctctctggatctctgtctccccatcggcagagtgggtgtggccccacaagccctacccaccctccagggagtatctggggtacaagtaagctaataagctaagtggagaagggtgtgactggacaagttcacccaggattattcctaaacaagcaccaggcacacactcgtgctctggccctcacccaccatccagggcagcagacggaggccattcccaagacctactcccacccccatgactaggggtcttcaaggggctgagcctggcccatacaggtagaccctgggcccaagatcttgcccccagacccacaccccagccaagtgccccaaccccatgaaacacactggctctcatcccccacttcctgtgtggaacaatggccaggaggcaggcccatgcagctgctgacctgccactgacctgccgcaggacactaagcaagccctagggcccccaggccacaccctctacaaatcaaattaaagctggggccctttccccagaaaaatgctcacactcaaaatcaggggggcagttttagggagtttgaggaccttctggaggctgctcacacaccctagaccagacaaccagggacagccacgtgctaagggccctcagctcagagcttcaggcaagaggctaccgggactccatccagatctcagatccctggttctgaaatcctcagcttcccaggccttgggaggataagcaaacagcaagagggcctgttttccgggtctgacccccacccccactccatgtccacgagccctggccctagtacctgctgcaggccctcctgacctccccgcagcctgtgcccatgaacgctggccctggtacctgctgcaggccctcctgaccccccctcaacccccatggccacgaggcccagccctggtacctgctgcaggtccttctgacctcccccgacccccatgcccatgggccccagccctggtacctgctgcaggccctcctgacctcctgccagcctgtgcccacaagccccagccctggtacctaccgcaggccctcctgaccaccccccacccccgtgcccatgggccccagccctggtacctgctgcaggccctcctgacctcctgccagcctgtgcccacaagccccagccctggtacctaccgcaggccctcctgaccaccccccacccccgtgcccatgggccccagccctggtacctgctgcaggccctcctgagccccgctacccagcctgtgcccagaagccctggccctgctacctgctgcaggccttcctgatcccccaccccgcagcctgtgcccacaagccccagtacctgctgcaggccctcctgaccaccccccagcctgtgcccacaagccctggccctggtacctgctgcaggccctcctgcaactcccgcagtgacgccgtcagccgctggttctcagcacgcagctcagagacaaggtccacattgtctggctccttctccttctccttctccttctccttctcctctgccccagggggcgggcccctggcccttcgaagcagtgcacactcttcctccagccgactcactttgagcttgagctgatccacctggagcccaagacatgggtcagcccagagggagacacactgggagccacgggttacaggggtgggaagacctgctccctcactcctgggtgcctcccagattcccagagaagccgaagcaggagtcctccccaggcttgtctatgaaaacaggacaggctggacagatataaaacaaacagggctgaggaaggagcagtgggtagcaaggccaaggacaccctcccaggggaatccactctaagaacttgtgggcggacatgctgcatcacgacacgctgtctgtcccgcacttctgacactgactcccgtcaatttagcccagtattctcatggcagaaaaggaggagggccgcatcaagaagaagtggggccaggcacagtggctcacgcctgtaatcccagcactttgggaggctgaggcgggccctcagtggatcacctgaggtcaggagtttgagaccagcctgaccaacatggtgaaaccccgtctctactaaaaatacaaaaatgagctgggcgtggtggcacatgcctgtagtcccagctactagggagattgaggcacgagaatcatttgaacccaggagatggaggttacagtgagccaagattgcgccgctacactccagcctgggcagcagagcaagactctgtctcaaaaaaaaaaaaaaaaaaaagaataagggaaaccaggcctaacactttagaaggccgaggcgggcagatggagactagcctagttaacacagtgagacctcgtctcgacaaaaaaaatttaaaacattagttgggtgtggtggtgcgcgcctattatcccagctactcaggaggctgaagcgggagaatcacttgagctttgggaggttgaggctgcagtgaaccataatcgtgccactgcactccagcctgggcaacagagcgagaccctgtctcaaaaaaaaaaaaaaaaaaaagaagaagaaggagaagggggtgaggaggaggaggggaggaggagggagggggaagaggtagaaggagaaggaggaggaggagaaggagaaggaggaggcgggaggagggcagagtgggaggaggaaagaaggaagaaggaagaaagaagaaagaaagaaggagaaaaaaaaaaaaaacagggtcagaccccagctccgtctctagctcagtgtgaccctgggcaagtcatggcccctctctgtgcctcaatcatctcatctgtacggggggggtgtgaggggagaggagagggcaatggttttgagagttgagggactcatccagtccgggaaccagatgctccccgcaacaagccaacatctcacctcaacacactctcagagactcagacttggtctggtccaccctgaaaggaattcctaacaaagcctccactccagaagatttggctgttggttcatctccctcaagagctccagttccagggttcaggtttcaattttgctacttctaggctctgtcatcctgagcaagtcacttacctcctctgggcctcagtttcctcatcagtaaaatgggcccagtcaatcccctggccccatcatttgcctcccaaaggtgttgcaagaatcaaacaagacagcaagtgggcagaggcctctaaactatgaagggctacagagctgccacagtgtgaccgtggctgtcttcacagcttcaaacaaaatcccatgcccctaaccaatcaccagttcggagtgtgcagccagaagttggcctggtatggggggtgggcagctgtggtgtgaccaccaagctgggagcagacgtgcatggccagtttgctggactatgagtgcactcagccaagcgtgacgcatgtggggtctgaggtggccagacagtgacaagagtggcagcaggtggcaggccataaaatgaagtcattgttgggaaaaggtcacaatgacttctggtgctacagtcaggcatgcaatatttggtgccctaggagtcccctggcctctcttggaaagtgacttgctagttccccagccttgagaggttagaatggcagccccccctccacacacacacacacacacacacacacacacacacacacacacacacacacacacgggtctggaggctgggtcaggcaattctacaaattaacagtccactcctcctcctccgcaagagactcagaaagaaattcatgactcccgcattcctttccactcacaaaacatgctttgtgaacagccagagaaagacagctcgttacaaggacaactgtggtcacaccctctcagcaaaccgcagccacacaccagggcctcctgcctgacccctggccagccggcttccctgatgagctcagaggacaggacacctgggagtctccgacgagcaacaggaaatacggatgcatttaatcccggcgtacaaactcactgagcacaaaattatagcgttcgttccttcagtttatgttgcttagaaataacagctcattaaatttgcaccttataaaacagggtattaaatcccagccgccacacacctgcctatgggaggtggggatgcaagccgccaagccaggcacgatcaggtgctctgttcagatccatctgcaacacctttgttaattttggagcagaaaagctccaaacataaattataaattaaggtaaatttatagtagctaagtttaatttcacttctttttttgttgttgttttttgagacagagtctcgctgtgtcgcccaagctggagtgcagtggctcaatcttgactcactgcaacctccacctcccgggttcaagcaattctcctgcctcagcctcccgagtccctgagaccacaggtgcatgccaccacgcccggctaattttttgtatttttagtacagacggggtttcaccacgttagccgggatggtctcaatcttctgacctcatgatccacccgcctcagcctcccaaagtgctgggattacaggcatgagccactgcgcctggccaatttcacttcttaggtccctaaaataggaaaaagcagccactctgcgtagaggcagatgacctgcagactacagaggcacctccgaccatctcttttccatccccctcccctgtcccagcagcccccagatggccacacacgcaggacatctcccaatcgcatcacacccaacccaaaggtgggacaagccgtgagggctgcagcccctcccagtacccccagcctgcagccctcacgccgtcctctctaagcagtaaattatttcttctgagaaaaccctacagcaagccccatgtctgtttcagaaaaaaggggaagccctctgggtaaagaaaggggagcactcctacctgccagccaccgcccctcagcagtgctgagagccaactcagaaatccttcaatccggctgaacacagtggctcatgcctgtaatccagcactttgggaggctgaggcgggcagatcgcctgaggtcaggagtttgacaccagcctggctaacatggtgaaaccccatctctactaaaaatacaaaaaaaaaattagccaggcatggtggcacacacctgtaatcccagctactcaggaggctgaggcaggagaatcgcttgaacgtgggaggcagaggttgcagtgagcaaagatctcaccactgcactcaagcctgggtaacaaagcaagactccatctcaaaaaaaaaaaaaaaaaaattccttcaatcccaggacattgggaaagtgctctaaccaacttctctgtgcctcagtttcctcctctagaaatggggaagatagtgttgtccaccccagcgtagggtggctggaaaattaaaggggtctgtgcatggcaagcactgaggatggtatctataaagcacaaggccgttttataattgttacatcatccttatctgtgatgaggatgaggaaactgaggcacagaaaggaaagccttccccatgccacatggtttttcacagtagagcaggcctgggacatgtccctgtccctgcccatcactcctcagaaagcctccgtctcctgccacacaccaaccaggccctcgaacgatagcctcaaggtcatctcacaacctcaaaccagccacctacatcctcaagcaggaccagcagcctggacccttcaactggtggcctcaacacccccatcagggctcacctccccaagatatcgacccacctggcgtgcacaaaccgaggactggcacaccagtgcacccacatctacagcctcacagccacctgcaatgctgtagccacggcccaaggctcctggggtagggaggcttcaaactccacggtcagaacccactgtgcagcctcgagcaacatggctggagagagcctcctgcgtgccgtgcggcctgcactgctaagcccttgacgtggatcagctcattaaatccttggaacaacgccctgtggcagtcaaatactggtattatccccctgctgagtcccagtcagaaaccaagaaagtgagatgcagtaggaggcacagcctcacttgctgctggagggagtcaggtgagacttccccacacagggagtaggcggaacagcagcgtgggaagggggctggcactggagccagccggacccggttcaaatccaggctgtgccgcttcctggctctgtgaccttgagcaagtcctttcactaatctgagtctcagagtctgtatttgcaaatgagggcttggcgtatggtgctttggtgaggattagaagacatgatgtttaacctatgtgtctcttgataataatatcaacaatggctactgatgacacaagttgtgagcagtgtgctagggactgtacatgtttgaaactgtgtcttaaactcaccgggccaggtacggtggctcacgcctgtaatcccagcactttgggaggccgaggcgggcagatcacctgaggtcaggagttcgagaccagccgggtcaacatggtgaaaccccatctctactaaaaatacaaaaattagctgggtgtggtggcacgagcctgtaatcccagctacccgggaagctgaggcaggagaatcgctggaacccgggaggcagaggctgcaaggagccgagatcacaccactgcactccagcctgggcaacaagggtgagactccatctcaaaaaaaaaaaaaaaaaaaacaacttatcaaatcctcataacccagtgtttcttggccccggccctaccgatgttttaggctaggtaattctttgctggggactgtcctgtgccctgcagggcgtttgacagcatccctggcctctacacaccagatgccaataaatccccactaattgtgacaaccagaaatatttcctagacatggccagatgtttctagggggtcagaatcaccccccattgagaaccacagtcataacccaatgaagtaggtacaccgagcactaaaaggacttatccacgtcaaagagccagcaatggtggctctgggacacaggctggctggctactacattgcaaaagctgccccttcccttgcctccccgacccatctccccagggcctaccgccagctgcaggtcacggctgcgaagtacagccgagttcttctcctcactgagctgtgccaggcgcatggcgatcatgtagttctcatccttgagccgcagcagctccaggctgcccgcctcccagtcctcccgcagccgttgacagcgctcctgagcctgctgctggtcccgcagccgctgctccagccctgcccgctcctcctcgagcacccggccccgggcctgcagttgctgctcccgctgcagctggctcttgcgagcttcccgcagccgtcgcacctctgtcatcaagaattgggtcaggccctcaggcccctcctcatctgccaggacagaacaggggacagaataggcagctcaggcaagtaaaatccaggagataacatactgtgtcaaaaaactcaaaccataaaaacactagagggaaattctggaatatatttgtagaattgggagcaggggaggtcttcctaaacaacacacaaaatccaggagttataagagaaaaaagatggacaaatccatataaaaatgtttaaacctttgaaaaatgaaagatgtaacaaagttaataagcaacagagtgggagaaaatataacaagaactcagagccgtaatatataaagagctcctacaaatcaataagatcaacaaccaaataaaaatatggacaaaaactatcaataggcaagtcccaaaataaaaatagttaataaatacaggaaaatatgcaccaacctatcaacaataattacagtagctactaatatttgttaacttcattctttgtgctagatatatcttaatctttatgacaacactgtaaggtaggtactattattgtacccatcttaaagacagaaaaactgaagcacagagcagttatttacccaaggtttaataactagtaacctgtgaactgtatcactcaatgaaatataaacttaaaacaataacattattttttacatatcagaatggtaaaaacgtttaaacatgatccccaggattcaaatgggcccttacacattcctggtaggaggtatgttgatttaacagttaaaatacacagactctttgagaaattcttctcagaacctcttcgcctgagacacatttgcacaaagacgcacatacaaggatgttcccgtatcgttgtaataatacaaaactggaaacctaggtatccatcaactggaaatgggttaaatgaattatgtcctaacttcactaatgaacagtatgcagtcacttaaaacaagtgtatgtaacagaggtgaaagaatcactaaaatcagttgttctaagaaaaagcaaaatacacacgtaggcgtgtgtgcgtgtgtgtatgtgtttgtgttttttatataaaaaaattcagctaggcgcagtggctcacgcctgtaatcccagcactctgggaggccgaggcaggcggatcacaaggtcaggaaatcaagaccatcctggccaacatgatgaaaccccatctctattaaaaataaaaatacaaaaattagcagggcgtggtggcccatgcctgtaatcccagctactcgggaggctgaggcaggagaatcgcttgaacctgggaggcggaggttgcagtgagctgagatcgcgccactgcactccagcctggtgacagagcaagacactgtctcaaaaaaaaaaaaattcaaagtcacctggagcctctgtatttttttacataaaaaactatacatctgtgtatgtcagacatatgtctgaaaacagtatcacgaagaaagagccatcttaagcatgtggctctgaacttggaataacggcactagcacccagccccaccctcagcctaccgtggggccctgggcaagccccttcagcctctccatgcctcagtttcccttactgttcaacaggcatagtgggagcgcctccctaacagggatggggaaaggagcctgtgcactggagtccgaggtgccagcatccaccgcagatccactcaccgaggatcatggagcagcgctgggcgggttcctggcccgtgagcagcgtgaagtgttcggggtagtagaactccagggcttccaggaaggcctcatagcccctcttgccacggcagcgcaagatgtccatcaggcgccctacagagtagtggggggatgtacccagggtctaggggaaggcctccccaggtgcctggttgcttctgcccccaccatgctccaggcccacgttccccagatttttgagccagtgacacacacaggggcctgtcccaacacatcagggaagagaagagagccattctgccacagccaggggagcacattccctcatgactcctgggctcccagagctccccaacaccccccacagacacagatgccggcccgcaaatgcagcctgccttttcaatggcacagagaagccccctctatccccagaagcaaagaaaatacttctcccattggccatgcctgaaattccaccattaaagaccattccatcatgcctttttgagttctggttcaaaggcacaccctgtgggagtggggacccacgtaaagctgagacggatcttgacacttgaaaaaggactcccccaggagtgtatggtgcacagaggaggggacagacagaactcggagatcaaagagcgcaggaaaggtgccaagtccaccggctgtgaccgggaggtcccaggcccagccggccctggcagccacatccaaccttctgctctaatgtggacccaggaagtgggagagaaccccaagagacaaaactctgaccccggtgtgggcaacgcggaccgccaaggcgcagtggtgggtggggaggaggcaggctggtgggcatacccagccggcccactctactgatgcggagaccgagccccagggcagcagagccctagcttcgcgctacacggctgtgggcgctgcgccccagggcacggccggcccaggtcgtggcccactcgggacccgcggctcaccggtgcggttgacgcggcacgggaagcggtaggtgctcagcacctcctcctcgtcctgctcgtcgatgacccggcactggcgcagatacggcgtgagcttggccgggttcagggcgcgagccagccgatgccggacgccctcgattcgctcccacagcgcgtcctcctccgcctcagaccccgagccggccccggcctcctcctcggcctcccccgcctccgcccggcccggcatggccgtgtcctcagggtctgcgggcaagaggcgcacgggggtcgaccagggctccctagggctagatgtgcggccaagcacccccggggcgtcgtccgcagacccgccgtcgggggcgcgccccgagctccccgcgactcaccccgcacgctacagtcgcctcgggctcccgggtccgcactcgggcggcggctccgccggcgcaggggggcggtgcccgtggcgcccccggctccgcccccgtccccgcagcctcctgggctgcccgggcctccccacattgccgcccgccccgggtcgtgcgtccggcccccggccaccccgcgcgtccgtctgcacgccctccctcccggccgtccggctgcgcctccccctgcttcctgtttcccgccggctctccagcccggctcggcggggtcctggccgcccgcccacacctgcccggcctctgggcggggcgggggcgggcaggcgcgctcacaccccccgcgcgccgcgacacaccttccccgggccacgcgcatcgcctccccacgcccacagcgcgcccgcccgtgcggggctagccgctcacgcccggcgcagcccgcgggcactcaagctgggcttgcccttctcgggtccccacatgcactgcgggcgcgggagcttccctggagcgcaggacagccccgcgggggacagcaatgggcagaggtcatgggggctttctgcaagatgggggtctgaacctgcagggcagcactgccaactcccctcttacgcaaactcccgtggcacttgaggaccagggaccccacaattctcaaagggtattcctccaggtgttggtcccagagatgctgggggcgggctgtgactagccatccatactcccgctcctgcctgggaggccggtggtgtcttaccatgatactggccgagtctacacggtatctgctggtgcatgcgatacagtctcgctatgcattagaagctgccaggtacctgctgccagggaggaacagaggaggcacaaccggtacaggaaagaggtgtgagctccctaatcgccttccacaacttctgaattagatgccgtggacatatgtattacttatccaaagaattaaggtttcaatcaataaaggctctgaaaagccctgcttaaattaaggccgggggcggtggctcatgcctggaatcccgacactttgggagaccgaggcgagtggatcacctgaggtcaggagttcgagaccagcctgaccaatatggcgaaaccccatctctactaaaaatataaaaattagctagacgtggtagtgcgcgtctgtaatcccagctactcgggaggctgaggcacgagaatcgcttgaacccaggaggcggaggttgcagtgatatcgtgccactgcactccagcagcccgggcaacagaatgagactccccctcaaaaaaaaaaaaaaaaaaaaaaaaagccccagcagtaaagaaacagatttaactttatatatcctggtgtccttttccaaacttaattaaccacagcctttttttggtttgcatttgttgtacatttgtttttgttttgggtgtcacctgtttacatgcagaagaaatgctttgggagaactgaattctagtgcaaattcctcaattaacaaaggaggaagcagagctcagagagggcaaggaacttgcccaaattcacacagcgaggccacaatgggaataggccggagcccagcccctggcctctgtcctctccaagccccgagtccaggcacacaccagacctccctttcaatacgtccttcccctctctgtggccttggttgccctcccacgcagagcggcagctcctcccaccagcagccctactcctcgtgaatatttttaacttggccagcagagcgggatggacgccttggaaaatgaggctatggttaattattttttcatcgagaagctaagcagggcctaaagataaggcacagaagccaagaggtctctgcagataagtggacagagaagtgagggcacactgggtctgaacaggcaggtagctgggtacaccgagtgcccctggtgcccagcattccaggggaagcgacagagttcctttgggtaccacactcccacattcacatgtacaattatacaggcatgcacacgcaccatcacatacacatgcacacatacacacccacccactgtgggcatcaagccaggcaggaggcagacaggggcgtacccacttccccacaaacatctgagcctcctcatctttcccctgtccccgggcgtccatagcaccgagtgtgcaagcgtgtgattaggtaccatgttcattattgtcctcttgtgagttctgctacattcatcttctctctatagctatgccaggaaggcgggcagggactacagcagggacaccgagaatctagactttgtaccaggggccctgggttctatcgcgggctcaccgctatgagtattgttcttctttgagtctccatttccctgtctgcaaaaggcaggcggtgagtagtcccagccacacctacaaaggcagacagtccaggagtggagggtgccctggagaccaacattcagccttagctgcatctactcggacaaattcctccccctctcaacttctacatctgaaaagtggacaatagtcccccatgtgcagggactgcctctgagttgcagtctctccatatgtgaagtgggtacaggaatgtcagtcctcttcccaactcatcaaaaggcatgcctccatgtttcaaaccagtctgcgtcctactgcctgtagccccactggtccaagccacacatgcccccacaaactcccacccacagtgctatgggctatggtatgttctccactctgcagccttaatgatgtttgtttggtttgggaggtttttcttagacaaggtctggctctgtcacccagcctagggtgcagcggcccaatcatagctcactgcagccttgaactcctgggctcaagcaatccttctgcctcagcctcccacatagctgggactgcacatatgcaccaccatgcccggctactttttttacccttggtagagaggggtcttgccacgttgcctaagctggaaagaatgatggttttaaaaacataacaggtttttctctggcttaaaacctcttaatggtttccaccaaactggaataaaatgcaaactgcccccagaccctgctggctcccccgcctcccacttcccactgccccactcgctcactagtctcattctgttcttggaacctgtcagcttcttccacatcaaggcccttgtccaccctgttgcctctgctgggactgctcatccctccactcctggtacggagggttccttctagcttttcaggtctcagatcaaattccccctcccttgattcaggagcaccctccagcagggagttccatacaccccatccaagcaattctgtgctacgtaggggccaaaggacagcttctccttctccctctagaggtttgccggaaatgcactgacaataggcagataaatagaagaaaaaaagcataaaaaatgtatttaacatgcctagcacaggggaatcataggagaatgattacccagttatccattgaggtccagatgtttatatccgcttcttcgctggggaaggggagacggggctgtaggagtgaatgactgttaggaggcattaatgggcctgggaggcagacattatcttacagatgattttctttggaaattgagtgggaccgaagaagaaacactcatttgggacaaagtttgtctggactctagatgtggtgtttaattttctcttcctctgtgatatgaattttaatctccagttaatgaaatttcagggaagggatcgaaagcaatcgtgttcctctttggggtccagtttctagcagataagggaacttcggagaacagcctcctcctgtgctttgggagagacagaggattgacagagaggatgggggaaaggttggcagagagaccttgaggttgcgtctttattcagcctatcaaagcgccttatttggcaggtatcactttctgagccccgagagctatttcctctctatctgacattttcctggtgcttgctttgctgcaccaggaaaatgtcagcaacctgtttgttgcctacttccatcccaagaacagagccgtccttggctagcaggagtgagctggaatgttccaagagtggtgaggatgaggagtggagcaggggaggagaggaggttgaaggaggattggaaggggggcagacagagcaaaggccttgaagatcattatgaggactttggcctttacttttcttggtagtaatacgccgctatcattgtcttccacaaatcagccacaaaggccacagaagcagggatccacctttttgttcattccttcaaggatgcccctggcccaagcaacccttccgttcctctttgtcagcctctgattgcatccaggaatgtgggtctggagttatctagtccataagtctgggtgcctggtgaatctgtgctccctgaccccaacccccagccccatctcgcctcctctggccatctcttcactaggatcagggcctgggccgcatggatcccagcacaggacctggcagtcaggtgttcagcaggagacgagtgagtgggcccaagagtggggagaattcctgtgatgagctgcactacaccacagccagaacgcccagggttcaaattccaggacaatgtgtgcctgtgatcttggtcaagttcctaaacgtttctctacccctcatctgagggactctagcacagcctgagcacaagacagatgctaaatgcccatcctcaattgaattcgtccagagatgtcacttcccctccccattgcccagtgtcccccggggcacctttacatagcagctttccctaggtcctattcttttttttttttttttagatggagtcttgccctgtcgcccaggcgggaatgctgcggcatgatcttggctcactgcaacctccgatccctgagttcaagcaattctcctgcctcagccaccctagtagctggaattacaggcgcctgccaccacacccacctaatttttgtatttttagtagagatggggttccaccatattggccagtctggtctcgaactcctgaccttgtgatctgcctgcctcggcctcccaaagtgctgggattacaagcgtaagccaccgtgtccggctccctaggtcctattctatgggactggggagagaaggggttggggaggctattgtgcccaatcacaagagtctaggctgaaaggatccttaagacctttattttatagctgggcacggtggctcacacctgtaatcccagcactttgggaagccaagatgggcagatcacttgaggtcaggaattcgagaccagcctggccaacatggtgaaaccccatctccactaaaaatacaaaaatcagccagatgtggtggcgggcacctgtaatcccagttacttgggaggctgaggcaggagaatcgcttgaacccgggagccaaaggttgcagtgagccaagatggtgccactgcattccagcctgggcgacagagcgagactctgtctcaaaaaaaaaatttttttattattttgtatgtactggggaaactgaggttgcagtggcccaagcgagccctgggttccccaaggcagggagagcagagcacaaggaagcgagataggaacagccaaagggatggtgctggccctccagtatcaggtgactgcatctccctgagaaccggggactcctgcaggggccagaggaagggtggccctgtccccaccttccctttctcccatggccacccccagcagccttgacagcaaggagtagaaatgctgacccaccctcaccctaattcagaccaattatggagatgtctgcctactgcctggccttgggctgggcaagaagctgggttaggctggggatatccagggatggggcaggaagctgtgccaggaggtgagagatggggctggggcaggctgggaaaagacagagaaaactgaagctgggctccccagacctggctcccatcgctgagactgtgccattcagccccgtccctgcccctctctgtgcctcagtttgcccctctgcaccacaaggtggttggagggagatgctcaccctggcaagccccctgcacctgagaggagctcccagggggccacaggacacagccaagggtggccatgggagctcaagccacccaccagcatctccatggaggaactctgcctggggccctgaattccagtgtgcctgtggaatcactggggctgagtcagaggaaagggcgggccaggggagccacggctctgagtcactggggctccgcgggctggcgtgccttcctctgccgcccacccaaccacccactcaaccatggagtcccaaccacggaatcatcctgacctggattcaaatcccagatcagtgaggtcgtgaggtcatgaccctggacaggaccgatgtgtagagacaatcatggttgtgtctgattaaatgaatgactttatgtgaagtgcttggcacaaagttggcactcagtgacaaacactttgctcagtagcaaacagttttgagcccttactatgcacccaacatatgacgtaccagcattttccagggttagctccttaaatcttcctaataaacccaggaggtaaatcctcctattctccccacttttcagatgatggaacaagtttggtgaggtcccacagtgggcacgtgtggacctgaaagggaattatcacagatgttaagtgtgggatgagggcctgccttgccccgcccctcaccctgcagcccaggttgtgacattcccccacctgccagcacagtcccctgccagtctctgtgcccagccctgtttgttgccctgaggatccaaatgaatggaccaacccaagcactgctttgaggaagcaggttcatacccaaccactttaagttgctggcagcgatgagaggaggaaatcctcgactctgcccaggggcatcaaaaactaaagcagaagaagaggcaaaagaggaaaggtgctccaggcaggaggaacggtcagtgcaaaggcccagagcccagaagtctcatgccaggctcccacagggatccttgtccttcgcttgctttaacttgcacagtttcagtcctgttcgtccttgttcccatgactcaggcgcccctcgcacaggggaggagcagctggtgagtgggccatccctgcccggaaggctggtgaataactgtcccactggggttcacactatggactgtgccaggtgccgaactcattccatctcacgctaccccagggggcggggcctgtgactaccccaggtccaagtgaggaggcccaggctcaggtaaggccacgggcagagcgccccggtcccacccagccacctatgtcagcctcaacgcactcttgggagaatgagcagcctctgtggctgtggaaacccaagttgaaatccctactctgccactcttttgttactggactttggggagttgacacctcctttctgggccccattttccatccctgtgcagtgggggcggcctgaacgaaagggacagcagcatggcctggggtcaggagcaccggctctggagccggagcacctgcattcacaccctctctctgggcctcagtctccttatggggaggataggagtaatgtcaaatgacaacacgcttagtttaaagatctaattggcttttagggccaggtgcagtggctcacacctgtagtcccagcactttgggaggccaaggcaggtggattgcttgaggtcaggagttcgaggccagcctggccaacatggtgaaacctcgtctctactaaaatacaaaaattagctgggcgtggtggcagatgcctgtaatcccagctactagggaggctgaggcaggagaattgcttcaacccgggaggtggatgttgcagtgagctgagatagcaccaccgcactccagcctgggcaacacagtgagactccatctcaaaaaaaaaaaaaatctaattgccttttatttgcaattctagaatcaggcaacacctccctctgtgaaatagaagggagattccaataagctgaacagaggatgttagcttttttataggcagagaggtgctaaagagggcagagacagagaacgaaaaacggaatggttgtttcacagttactttccttgtaaagggttacagcagagaagacttccttaggccagtgactcaggttgactggaagctcctgttctctagagaaacagacccatttcaaagttcagtttgagcatggagctcttagcacaagtgactcctttctgatttggtctggtaggatgggcctagtacaggaggctagtctgaaacaatggcctcccatgcattttatttaacagcacctaccggatagggttgttccgaggacagaatgagttaatacacataaatagcttagcacagtggcctccacatagtaggtgttcagcacagtgttggctgttgtcatctatgagtatcctatctgctgggacaacccatgaccagcaatcggggtggcagcaaattctgctcattccccccacccccccgccactcccgtgcccatcctggcctaagtcccgcacacctggccccaaagacacctctggactagctccacccctctgtctggaatgcttttccctcccctttcctcatgccccgctccaaaacaccctttggttctctgctcacaggtcctctcctcagggaggtctccctgcccaccgagtaggaaggagatcctccaattttttattttattttattttattttattttattttgttttattttgttttattttattttattttgttttattttattttattttattttaattttattttgagacggagtttcactcttgttgcccaggctggagtgcaatggtgcgatctcggctcactgcaacctctacctcccaggtccaagcgattctcctgcctcggcctccagagtagctgggattataagcacccgccaccacgcctggctaattttttgtatttttggtagagatggggtttcaccatgctggccatgcgggtctcaaactcctgacctcaggtgattgacccaccaggacctccccaagtgctgagattacaggcgtgagccaccatgcccagccctccaattagcttttttgtctccagcccctatttttcactttggtactctcatcaaaatctgtcaactcttttatgtatttgtccacttccgtctctatagaatgtaaacccctgagagcagaggtggtgttcgcacctccatcgccgcatccctagagcctagctcagtgcctggcgcgcagctggtactccacagatataggtacaatcaatgaatgaatagtacgtagtaggttcctagtaaatcccacacactaagcctagctcatcagtgactggcatacaggtgctctcaagagatatgtgtaaaatgaattaattaatagtatgaattaggttcccaatgagcgggctcccagagagcaggataggaccctagcgctcggggcaatataataattgctaacattatggctgggtgaggtggctcgtggctgtaatcccagcactttgagaggccaaggcaggtaaatcactcaagcccaggagtctgagaccagcctgggcaacatgatgaaatcctgtatctacaagaaaagtacaaaaattagctgggtgtggtggcacatgcccatagtcccagctactcggggggtgctgaggtggaaggatggcctgaccctccgaagcggaggttgcagtgagccgagattgcgccactgcagtccgcagtccggcctgggcgacagagtgtgactccgtctcaaaaaaaaaaaaagaaaaaataataataataataattgccaacattatggaatgctcgttatatgctaagcagcgttctgagcacctttcctccccacgacgaacctgtgaagcagtcactatttatatatatatatatttttttgtttgttttttttgagactgagcctcactttcgtcacccaggctggagtgcagtggcgcgatctcggcttactgcaacctgcacctcctggattcaagcgattctcctgcctcagcctcctgagtagctgggattacaggtgcacaccaccactcctggctaatttttgtatttttaatagagacggggtttcaccatgttggccaagctggtctcaaactcctgacctcaggtaatccacccgcctcggcctctgaaagtgctgggattacaggtatgagccaccgtgcccggctagcagccacaatttctatccagatttcatggatgaggaaactgaggctcagaggcaagtaacttgctccagggcacccagctatgtgtcctggaatttgaacctagacacactctggttcataaagttggcttgcttttcaacactgcccactactgcaagcaggaagacttcctggaggagatgtggcagaagctgggcctgggagagtggaacaaattcctacaatagggaactgagtcgctgggtgcagcagctggcaggagtggagcagagagggcactggggaataaagttggcaggtgtttcagttatctattgctgataggaatccacccaaaaacatggcagcattgacttagcaacaaccatatacttaactcaggaatctgcaactggcaggactcagcagacacagctcatctctgctcacatgacatcagtcctctgtggtctcactacctggcctctacaacatggtggcagcagggcagccagcttcctacatggtggtttcaaagacacatgtcaagagacagccagaggaagccatcgccttttatgatctggccttggaagtcagccagtgtcacttctgttatattatattagtcaaaatacaagtctgcccaggttcaggggaaaggggaggactgggtatagcctgttttatacagtctgatagatagttctggaggctgagaagtccaagatcaaggagtcaggagatttgggtccggtgagggcccactttctggttcattgatggtgccttcttattgtgtcttcgtgatggaaggggtgaggggtctctcaaaggtctcttttataaggacactaatcccactcgtgagggctccaccttcgtgatctaaccacctccccaaagccccacctcctaattttttttttttttttttttgagacggagtctcgctctctcgcccaggctggagtgcaatggcgcgatctctgctcactgcaacctctgcctcctgggttcaagcaattctcctacctcagcctcccaagtagctgggattacaggcgcctgccaccacacccggctaattttttgtatttttagtagagacagggtttcatcatgttcgccaggctagtctcgtactcctaacctcaagtgattctcccgcctcagcctcccaaagtgctgggattacaggcatgagccactgcgcctggatgccctacctcctaataccatccatcaccttgaaggttaggatttcaacatatgaattttaggaagaaacattcagactatagcatgatgaaaaaacagcatttaagtgttataaaccccgagaaagcaaaaataacatcaacaataatagtaggaggggaaatagggaaaaatgtaaaagagctttcaccttttgttagaaagaaccgattcaaactgattaaattgaaacatgtagttcttttttaattattccaaatattccaaataaaagataagactgtcaggatgaataaagtaacaaactccactatatgctacttacaagatatatgatttaaatataacagcacagaaggcccggcgcagtggctcacactgggtgggtggatcacgaggtcaggagttcaaaaccaacctggccaagacggtgaaaccccatctctactaaaaatacaaaaattagctggtggtggtggtggtggtcacctgtaatcccagctgctcgggaggctgaggcagagaattgcttgaacttgggaggcagaggttgcaatgagatgagatcacgccactgtactccagccttggaaacagagcaagactccgtctcaaaaaaagaaaaaaaagaaaagaacacagaaaggttgcgaatttaaagatggaaagagatctatcacccaaacaataaccacaaaaaaatctgctgtacctgtcccaaagttaaagagtagaatttaaggtaggaagcatgagcagaaacttcatttcagttaggaaggtatcagaatcccaagtctgtatacatccaatagcagagcttcaaaatacaagtaaagcccaatggaactaacaggagaaatgggcaagtctagtcatggaaggagacttaaacacacatctccaaaaaacttatgtggatttaacaaagtcactagatatggggtcaatagataagatcaactatatctctgtctactagccacaaatataaacaaagttttttgtttgtttgtttgtttgttttttgagacggggtctcgctctgtcgcccaggctggagtgcagtggcacgatctcagctcactgcaagctccacctcccaggttcacgccattctcctgcctcagcctcccgagtagctgggactacaggcgcctgccaccacgcctggctaatttttttgtatttttagtagagacggggtttcaccgtgttagacaggatggtttcgatctcctgacctcatgatccgcccgcctcggcctcccaaagtactgggattacaggcgtgagccacagcgcccggtctataaacaaagttttttaaatgaacccattaaactcatagcagataatatggaagaaaatctagattacctcgggtttggcaatgactttttttttatttttatttttccgttgttgttgctgtttttggttttgtttttggagacagggtcttgcactgtcacccaggctggagtgcagtggcacaatcgtggttcactgcggcctcaaccctctgggctcaagcaaccctcctgcctcagcctctggaagtactgggattacacgcgtgagccaccacacccagccttatttttcttttcatttttttccttctggtttgtcacgggctcagaaagagggcaatgactttttagataatccataaaagaaataattgatgaggccaggtacagtggctcacgcctgtaatcccagcacttgggaggcgccaaggtgggcggatcatgaggtcaggagatcgaaaccatcctggctaacatggtgaaaccctgtctctactaaaaatacaaaaaattagccaggcatggtggcgggtgcctgtagtcccagctactcaggagggtgaggcagaagaatggcgtgaacccgggaggcagagcttgcagtgagccaagatcccaccactgcactccagcctgggcaacagagtgagactcagtctgaaaaaaaaaaaaaaaagaaagaaagaaagaattgatgagttgggcttcattaaaattcaaaacctgtgctttgagaaagacactgtcaagagaataaaaaggtaagaccaggagaaaatatttgcaaaagacatatctgataaaagactgtcgaccaaaatatatgaaactcttaaaactcaacaataagaaaatgaacagtggaacgtgcctatagtcccagctactcaggaggctgaggcaaaaggatcacttgagcccaggaattcaagaccagcctgggcaacacagggagacccccatctcttaaaaaaaaagaaaaagaaaaagaaaaaagaaaagaaggcggggcacagtggctcgcgcctataatcccagcactttgggaggctgaggcaggtggatcacctaaggtaggagttcaagaccagcctgaccaatctgatgaaatcccatctctactaaaactacaaaaattagctgggcatggtggcatgcgcctgtagtcccagctactcaggaggctgagacagaagaattccttgaacccaggaggtggagatggtagtgagccgagatcatgccactgccatccatgccattccagcctggatgacagagtgagactccatctcaaaaaaaaaaaaaaagaaagaaagaaatgtgttatcaggccatgaaaagacatggaggaagcttaactgcatgttgctaagtgaaagaaaccagtgtgagtaggctacatactgtgtgatctcaactatatgatattctggaaaaggcaaaactatggagatggcaaaaggatcagtgtttgccaggggccccggggaaggaggggatgattaggtggagcacaaaggatttttagggcagtgaaactattgactatgatactataatggtggatacatgtcattataatttgtcaattccatagaatggacaccaagcatttacaatgaagcttatgtcaactataggccttgggttaaagatgtatctatccatgtaccttcactgattatagcaaatgtgccactctggtgtgtgatgttcatggagaattctgagttaggggggtgggtgttatatgggaaatctctgtactttacgctcaattttactatgaacctaaaactgctctaaaaaataaagaaagtctatttttaaaatgaagccatttatggaagcatcaaaaacatcaacttggtaggaataaaccaaacaaaagatgtgcaagatctgtacactgaaaactacagaacgtcgttatgtatgagtcactaggaaaagcagatccaaaccacaatccgataccacttcgcacacactcagatggctgtaatcaaaaagacaaacaaaacaagtgttcgccagaaggtggggaaattagctccctcacacattgctagtgcgaatgtacgatggcacggttgctttgggaaacggtttagcagttcctcaaaaagttaaatatagagttaccatatgacccagccacttcactcctaggtataaaatacccaagagaattgaaaatacatgcccacacatcatgttcattacacatgatgttcatagcagcattattcataatagaacaaaagtatcaacgatccaaatacacatgcatgggtgagtggataataaatgtatcattccagccataaaaataaataaagttccaatatgtgctaccacatggatgaaccttgaaaacattacactaagtgaaagatgtcagacacaaaaggccatagattgtatgatcccatttatatggaaagtccaaaacaggcaaatccatagagacagaaaggaattagtagttgctagggactaggggaaggggaaacagagaatgacaggaatggagggtgacaggtggtgtatgaggttttggcgggagtgaaaacatatctggaaattaggtagtggtgatgactgcacaactttttaaatatactaaaaacctggccaggcgcagtggctcacacctgtaattccagcactttgggaggccgaggggggtggatcacaaggtcaggagttcgagatcagcctgaccaacaaggtgaaaccctgtctctactaaaaatacaaaattagctgggcatggtgagagatgcctgtaatcccagctacttgggaggctcagtcaggagaattgcttgaaccccaggaggtgaaggttgcagtgagccaagatcatgccattgcactccagcctgggcaacaagacccaaactccatctcaataaataaataaatatacaaacaaacaaaaacccactaaattgtacagtttaaaacaggtgaattttattgtatgtgagttatatttcaatttttaaaattaataaaatgacattattgtgggaaattaaataagatctaaatacatcactgggcacagtggctcactcctgtaatctcaacactttgagaggccaaggcaagaagattgcttgagcccaggagttccagaccagcctgggcaacatagtgagatccagtctctacaaaaaataatttaaagattagccaggtatggtggcacatggcctgtagtcccagctgccggaaaggatcactcaagcccaggaggtcaaggctacagtgagcacgagaatcgtctgaatctgagaagcagaggttgcagtgagccaagatcacaccacggcactcaagcctgggcgacagagcgagaccctgtctcaaaaaataaataaataaataaatttaaaaagtggtatattcacacagtggagtgctactacacagcagtgaaaataaataataaatgtataactacaggcaacatcgtggacgaatcccataaacataatgttgagtgaaggaagccagacagaaaagaggacaggattccatttacgcagaggacaaaaccaggttaaaatctgcaagatcaggatactccttccttgtgggaggaattgtagaaagtgggctcacaggggttcatgggggctggctgtgttctgtgtctttatttggtttctggctatatggtgtgctcactgtgtatacacttatttcatatatataatatttcaactaaaactgtacccctgcttctctgccatgggctgatgtgcgctccccaaaaatccatatgttgaagtcctaacccccagtatctcaggatgtgatcatatttggagataaggtctttaaaggggtgactgaagactgggtaagctgggcgcggtggcttacgccggtaatcccagccctttgggaggtcgaggcgggcagatcaccagaggtcaggagttctagacaagcctggcccacatggcaaaaccccatctctactaaaaatacaaaaattagctgggcatggtggtgcatgcctgtaatcccaactccttaggaggctgaggcaggagaatcgcatgaacctgggaggcagaggttccagtgagccgagattgcgccactacactccagcctgggtgacagagcaagactctgtctcaaaaaaaaaaaaaaaaagactgggtgaggtggcttacacctgtaatcctagcactttgggaggctgaggtgtaaggatggcttgagcccaggagttggagaacagcctggcactgtagtgagaccctccccccatacaaattagccaggtgcagtggtacctgtctgaggtcctagctaccctggaggctgatgcagggggatagcttgagcccaggaggtcaagactatcgtgagccgtgattgtgccactgcactccagcctgggcaacagagcgagactgtctctaaaaacaaaaacaaagcataaagaggtgactaagttaacatgaggggctgggcgcagtggctcacgcctgtaatcccagtacttcgggaggccgaggggacacttgaggacaagagtttgagaccagactggccaacatgtgaaacttcatctctactaaaaatacaaaaattagttgggcgtggtggtgcatgcctgtaatcccagttactcgggagactgaagcaggataatcacttgaaccgggaaggcggaggttgcagtgagccaagatcatgccactgcactccagcctgggcaacagagcgagaccctgtctcaaaaaaaagttaaaatgaggtctttagggcaaaccctaatccagtatgatttgggcctttattcggttactggctacatggcgcgctcactctgtatacacttatttcatgtatataatgtcaatcaaaatagtacccttgcctcttataggaagaggagatttggacacagatgtgtacagaagaaagatgatgggaagatggccatctacaagccaaggagagaggcctgggaagaagccactattcccatcccttgatcctggacttccaacctccagactgtgagaaaatcaatttctgctatttcagccccccagtctatagtagtttgttaaggaagcccaaactaatacaacccccaaaggtaaattatatgcaatcatatggaataaatgcaaaaatgtcattatgtggaaaaagacagtagagaattgtatatcgtatgccaccatttgcttttaaaaagaagtgggggaatgtgtgtgtggtgtgtgtgtctgcatatactgtgtacatgtacatacatatatacatatataaatcatcccagatcatctctgggagaatatggaggaaactgccatcagttattgtttttcatttattttttatttatttattttattttttttttttttttgagatggagtctcgctctgttgcctaggctggagggccatggtgcgatcttggctcactgtaacctccacctctcgggttcaagcaattttccctgccgcagcctcctgaggagctgggattacaggcaccccccaccgctaccacatctggctaatttttgtatttttagtaagggtttcgccgcatggccaggctggtctcaaactcctgacctcaggtgatccgcctgcctcagcctcccaaagtgctgggattacaggcatgagccacggtgccaggccttttttgtttgtttgttttaaatagagacagggtctcactatgttgcccaggctggtctcgaagccctggcctcaagtgaacctcctgccttggcttccccaaagtactgggattacaggcgtgagccactgcgcccagccagctgttgtcttttagaggggaactggaggcctacataaagttggtttcgttttcttttgttttttgagacagagtctcactccatcgcccaggctgaagtgcagtggcacaatcttggctcactgcaacctccacctccccggttcaagcaattctcctgcctcagcctcccgagtagctgggattacaggcatgcaccaccacagccggctaatttttgtatttttagtagagacagggtttcaccatattggccaggctggtctcaaactcctgacctcaagtgatccgcccaccgtggcttcccaaagggctgggattacaggcgtgagccactgcactcagccctacgtaaagttttaacccagttaagtatattttttaaatcactaaatagttcacacatatgcaaatgtttagagaaaaacaatgaacaccaaaatattcaaaaagactaatgtttggaaagtactcagaattgtattccccaaaaattcattcccccaagacccacaggcctcaggggtctgcaggtctctctcagggccagagacggggaaggggccacctggcaagggcggtccttggcaccttcccccctttacagaagaggtgtagagatgagggtctcactatgttgcccaagctggtctcgaactactgggctcaagcaatcctcctgcgtcagcttcccaatagcaggacaccctgagaagtctgaaggctcacgcccagacccacgcacaggtctagttttggtccacagcatggcgtgggtgtggctttggagttggcggcagctgaaggctgggtgacgttagcaaggtctcagcctcagtctccttatctgaaaaactggatagtaattccctctttatactgcggccatgaagaagagggctgatgtgggtggagtgactggtggggcaggcgctctgtaagtggctgtcagcagggcaggggctgggctcaagcctgtgaccacactgctccaagctggacacacggtggcgccctcgtcccacaggtgcagcaccagttctagcctctggtggcatcggttactggagggagggagggaagaagagaggaacggagttatatttgcaaacacactgcccactctgggccctaggggtggaaaagtgaatgaggaccacacagttcctactcaaggaggctggattggaggggctgggagccccaaggaggagaggaacgtgggagagggcactgcctggggattttgcagtgggttgactggtggcccccctgcaaaagacacgtccacctgggaccagggaatacagtcttatttgaaaaaagagtctttgcgaatgtaatgaagataagaatctcggccgggcgcggtggctcactcctgtaatcccagcactttgggaggctgaggctggcggatcacctgaggtcaggagctcaagacaagcttgaccaacacagcgaaaccccctctctactaaaaatataaataaaaaattagccaggcgtagtggcggatgcctgtaattccagctacttgggaggctgaggcaggagaatcgcttgaacccgggaggagagggttgcagtgagaccagattgcaccattgcacgccagcctgggtgacaagaacgaaactccatcttaaaaaaaaaaaaaagtaaggatctcaagatgagatcgtcctggattatccgtggggggccaaatccactgacaagtgtccttacaagaagagaagatgctgacacagagggagctacacggaaatgtcggcagaggcaggagcgaggctgccataaggcaaggacacctggagccaccagaagcgggaagaggcaaggaaggattctcccctagcaccttcagagggagcggggcccctccaacaccttgatttcagacttctggattccagaactaatcatttttgtttgtttgtttttcagtgacagggtcttgctctattgcccaggctggagtgcagtggtgtgatcatagctcactgcagccttgacctcctgggctcaagcgattctcccacctcagcctcccaagtggctgggactcccagctcacaccaccatgtccagctaattttttaaagttttttgtagagatgagggtctcactatgttgcccaagctggtctcgaactactgggctcaagcgatcctcctgcgttggcttcccaaagtgctgggatcacaggcgagagccctgcacctggcgtggagagaataaatttttattgttttaagccaccaagattgtggtcatttgttacagctgccacaggaaactaatagagatgtttaaattttcttcctgccactcggttcactgactcccactcctaatagcctacaggattgtgcccaaggccccaaactcctggccccctacttccccccaaaacccaaactccaccacacccactgctctccaaacacacaggctatttgacacctctgcactcttgctttggcagctctctgtctgggatgcccttcccttgctgatcccctggacgactactacagacatttcaaagtcctccttcaacatcccctgctaagtatattagtatcttctgaatcaatggcttccaggacactcacactcctccatctccctcagcccactgtgttcctcgctccttgtttcatcaccagcagctcagctacatgccccaccccctccactagtcctctcctggcctctccatccccagaactaatgccctcgttcaggaaccccatctcccaccaggcttcttgtgcctactcctaactggtccctctgccctggtctggcccctccagtccatcaccactctgtagccctggcgttcagctctaccatgtcactcctctgctcaagagccttccatggctccctgctgccctgaggagaatatccaaagggaatgatagtatcttcaaatgctccttcccacctctcaccccaccactgtccaacacatccatgtgctacacacctctgggcatttgcacaggcagtggccttcccctggcatgtcctctccctgtctgccaggcatgctccaacccatgtcttgggcagcccctcccacagtacccaccattcagcagtggcatcagctaaaacatcacaaggctgaccatacaccaggtgctgtcgtaagctctttacatgtgttaaccctttggattctcataacaacaccaggaaaaagccaccattcctgtgtccagctcacggatgggaaaaccaaggcccagatgggagaagaaccattcagaagtggcagaaggaggccgggcacggtggctcacgcctgtaatcccagcactttgggaggccgaggcgggcggatcacaaggtcaggagatcgagaccatcctggttcacacggtgaaaccccatctctactaaaaattcaaaaaattagccaggcgtggtggtgggcgcctgtagtcccacctactcaggaggctgaggcaggagaatggcgtgaacctgggaggcggagcttgcagtgagccaagatcgagccactgcactccagcctgggcgacagagcaacactctatgtcaaaaaaaaaaaaagtggcagaaggagccaaacccagcctgcactgtcaaccctcctggtaggggcctcagaattgttgaacctccccttacccataccaagcccaaatgcaccaccctctcctccgtggattccaaattttgtaaacacatccctcactgtgctgtgcaagggttaccccgattacacggtggtcttcccctcccagaagcccccggaaaacttcactgttcttgtctaggtccctggtaactggcacagtgcaggagtttaataaacgagaatgaatgagctcatgagcaaatggtttccagggaaattgggccctggggatttctcaccctcctcaaagaacaaattatgcaaattctctgggaccaggccctctgctttcctcctccccactaggtttctgggagggtgtctgggctcaccagaaagtgccccgggctctctagtggcccgtttcctgattacaaatgaaactagggcttaaagctggtgaatcactagcaactgccagccagggcgtgctgggtgtcaggtggggtggatgggagaaggcaggctcacaaccagacttccctactactcctgccacccccaactttgccatcgtggcatgacctccccagccactgatgacactagctaggaaagagcctagctctgggggctagacaagcttgagcaactcctggactgtccacactcctatccctgagcctaccacccctgggtcccaggaacccacagcctgaaccattcgcaaacctctttcccaagcccagtctcaggtaactcagggatggtatccagggaggtactgtatccccattttagaaatacagaaaccaaagttcagggtgagggaactacccaagaccaccccaaagaaagtaagtagggcctaggaagttgaaccccagtcttctgcctctccagtggggtttaaagcagaactggcctttttttttttttttttttttttttttttgagactaggaattgccctgtggcccaggctggagcgcagtggtgcaatcatggctcactgcagcctgctcaaactcctgggctcaggcgatcctcctgcctcagcctcctgagtagcaccaccatgcccagctcattttcttttcttttcttttctttttctttttgagatggagtctcgctctgtcacccaggctggagtgcaatggcatgatctcagctcactgcaacatccgcttcccagcttcaagcaattctcctgcctcagcctcccaaggagctgggattacaggcatgtgccaccacaccctagagatggagtctcactgtgttcattaggctggtctcaaactctgggcctcaagcattcggccatttcttgattcaaacgtcacaaacttagagggcaaaagagtgaaaagtaaggatcccagctcctacccaagactcctggaggaatttcatcaagtgttcaaggaccctgaggcaggttgggaaactgcaaaccagtgggtaagagcccatgtccaggtggacgcctcacaagtcacagggtttttgtgatgttgggcaagtttcttagcttctgtaggtctcagtttccccatcagtgaaatgggaacaaatcttagtacctactgcgacataggattgtggtgaggatgacatgaatcaacacggatgaggctcagagcagtgccaggcgggcagtacatgctcaataaacagtagggtttttaaaagtattttgaaagattcaggccgggcacggtggctcacgcctgtaatcccagcactttgggaggccaaggtggacagatcacctaaggttgggagttccagaccagcctgaccaacatggagaaaccccgtctcaaccgaaaatacaaagaaattggccaggcgcggtggctcacgcctgtaatcccagcactttgggaggccgaggtgggtggatcacctgaggttgggagttcgagaccagcctgaccaacgtggagaaaccccgtctctactaaaaatacaaaattaggtgggcgtggtggcacatgcctgtaatcccagctactagggaggctgaggcaggagaattgcttgaacctgggaggcggaggttgcagtgagccgagatcacaccactgcactccagcctgggcaacaagagcgaaactccatctgaaaaaaataaaataaaataaaataaaaaataaaaaaaacacaaaaaattagccaggcgtggtggcagatgcctgtagtcccagctactcgggaggctgaggcaggagaatgccatgaacccgggaggcggagcttgcagtgagccgagattgcaccactgcactccagacggggagagagagcgagactccatctcaaaaaaaaaaaaaaaaatactggctgggcgttgtggtgcatacctgtaatcccagctactcgggaggctgaggcaggagaatcacttgaacccgggaggcagaggttgcgatgagccgagatagcacgactgcgctccagcctgagcccacaagagtgaaactttgtctcgaaagaaggaaagaaaggaaggaaggaaagagacagaaagaaggaaggaaggaagggaggaagggaggaaggaggaaaggaggaaagaaggaaagaagaaggaaagaaaagaaggaaagaaagactcacttcccaaggagaaaccatttgggtgagtccttgtcatcagagaggaatgctccccatacctgcctggtagaaggctcaggcctggggcctccttataaatcccaagacctgtcccacccagacctgcccagtcagagacttggagaaggggagctgatattttgggtttatttgtttttgtttttgagacagagactcgctctgtcgcccaggctggagtgcactggtgcaatctgggctccctgcaacctccacctcccgagttcaagcgattctcctgcctctgcctcccgagtagctgggactacaggcgcaccaccacatctggattttttttttaatagagacagggtttcaccatgttggccaggctagtctcaagctcctgacctcaggagatccaccccccaaccgtcggcctctcaaagtgctgggattacaggcatgagccaccgcgcccggccagaagctgatgttttgaaccacagccccagggagtttcttggatcaggcaagtctgggaatcctagaggctgcgtatcaggtccttctttgaagactcttctggtgaaacaccttccgcccacctgtcaacatgtccttggggtaaagccaactttctcttcttctcaattaataataatgtttcctaactggaattgggtgcacactagtgccaggtgctttctaaaatataaattaattaatttcatccaccagtagccctctggggcaattatttttagctccatcttacagagggggaaactgaggccaggggagttcataactcacccaaggttacacagctggaaatttggaagagccaagactctcttccccaccacagaacagcctgtgcgagccgccccagcgcctggaggcaccgacccagagcgggtctcacaaggctgaaaacctggggtcttcccagggcagtagggcggcttcatggaactagaggctgtagtcccagtcccagtccccaggcccttcccctcgccaagtctgcatagccacatcaaattgtggtggttcctttaccaggctcccctctgccttcctgcctggggcaaaagagggcgctccagagccacagaaagtccactgggacaaatgacctcatccttccaccccagccctccactccctaaaacctcccctccttccctcacctgtgcctttctccaaccctatcatgtcactagcacttctctagaagtgccatgcctttggccaggttgtttcctgggccaggcacactctttcacaattttaggcttctatattgagagggtggcctccttcctccaggaagccctccctggctgcctcctctgagctagctagctccaatgtgcccccacggcctctgggggatgactgccccaagcatcaaccatgttgtgccctaaggggctggggtccgggaggggagacgaggacaggggtcacctacctccttttgggttaggtgagggagcgtgtgggggatggggcaggcctccctctgcccggcctcttctggaccagcgaccctgaccctcaggccctcggtcaatacccattgggcaactacaggatcgatcggctggggctgcctggagggggaggtaggcagggttgtttgcttccccaggggcacctttggccagccccacccctccgtggaggtctcccctgccggtctcagcctcttgacgtcctcacccctcctctgggattgtgcaggcagcggggggaaaaagagggaggcagcagcagatgggggctgacccgggagctggctcaacgccctgccctagggatggagagactgaggccgccagagcctggtcaagccagagctgaagcctccggccccagcgggacgggaaggaatctggtctcctccttcctggctccctcagccccgcccccatcagagctggggaggccccgggatgggaggagaggactggggcggggcacccagacttggagtggggcctggagcccgggatgcttcctgcggaccttcaactcccacattccaggctgttcccaagactcctcgctcctcctcccttctctacccatcccgtgttgcgggcgggggcgcgggtgttagtggccagggtctgagctagctgcctggggcctgtgggggtactcgggggcccctcctagggagggattagatctacactagaggggctgccctggaggcctgtccaagcaccacccaagggtacttgtgattgtcgtaaacaggaagcccccctttccccaccgcaccatgtagacaggccctgtgtgtccagacgctgcgctctggaggccgggggctcttgacctccccggctgcgtttcctgttagctgagccagaggagaaagaaggggactgaaatgggctggacaggggaggtgcctcagggagtgagagcagaaggggaaagagccaaggagtgaaaggccagagctgcctggcacacagtaggtggtcaatagtctgtggcctgaggttgggtaagaagggaggggcccctctgaggagagccatacagttgccgggaagagtggaggattcaccccactgccaccaaggcctggcacatagtaggtgctcaggaaatatttgagatccatgtttagagtaggccgggaggaggcgttcttggaagagagcagtgtttctggagaagaaaatgaggccaccccggccttgcagcccgctgcgggctcagcattcccccaccgtccctgtctggcccccgccccgccctgtggctgcctgggccaggccactgtctcaaggccctttatttttaaaatccctgcggtgttcctgccccaagactaaggagcagtgccagccaacagctcagcctgcggcctgggctcagggcctaaaggcgccaggggtggggcatctggccaccccacagctgctggcccagccggcctgcctgagcagggtgaggaggcccctggaatgcccccaccctgggcccgaggcattagtccttagtccctggtgaagggacagaggcccacaagggtggcaagcaggctttgcatgttgaatatagtagcttgttcctcccacatcttccaaacaaatacgggcacagcacctactgtgtgtaaggaggaggcgcgagctggacctcgtggggtgacaaaggggtgagacatgctttctcttttccagggagtcagggcctgcagaggaaacaggcatcgcagttgtgggcatttcttgaaagagccacggactggaatctaagaggcctctgggccccagtcctggctccatcccttcccagctgtgtggacttgggcaaggcatttggtctctctaagcttctctacaaaggaaaacaatcacagctaccatggaaggctgctgtctgtcactagacacagcgatgagcaacgcagtcaccatccctgccctcacggaggttaatgtcatgggggaaggtggtcccctgaacaaggtcatggcagtcaccagaggcacagagcagcagcacggaagggagggtgctggggggcaggggtgggagagaacttaatttatgtgttttggttttttgagacagagttttcgctttttctgcccaggctggaggcaatggcataatttcggctaccgcaacctccacctcccgggttcaagtgattctcctgcctcagcctcccgagtagctgggattacaggcacacaccaccacacccggctgatttttgtgtttttagtagagacagggtttcaccatgtgggccagcctggtctcgaactcctgacctcaggcgatctgcccacctcagcctcccaaagtgttgggattacaggcatgagccaccacgcccagccaagaacttagtttagatccctggtcccgtaggcccctgaggaggggacgtttgagccgagcagaaaacagcctctcacttatctgggaaaagagtattctctgcagaagaaagagtattctctgccagggccctgaggcagcaggtgacaggtatagaaatgaaaggactttgtaaacccttgagggctgtgcgcctggcaggaggtgctattattattattattatttgtttttttgagaaggaatctcactctgtcgcccaggctggagtgcagtggcgcaatctcagctgcaagcaacgcctctcggtttcacgccattctcctgcctcagcctcctgagtagctgggattacaggcacctgccaccacgcccggctaacttttttgtatttttttagtagaaacggggttttaccatgttagccaggatggtctcgatctcctgaccttgtaatccacccacctcggcctcctaaagtgctgggattacaggcgtgagccaccacacccagcctattattatttgtttgttttttttttttgagacggaatctcgctctgtcgcccaggctggagtgcagtggtgcaatctcagctcactgcaacctctgcctcccaggttcaagcaattcttctgtcacagccttcagagtagctgggattacaggtaagcaccaccacgcccaactaacttttgtatttttagtaaagacggggtttcaccatgttggccaggctggtctctaactcctgactttgtgatccgcccacctcggcctcccaaagtgctgggattacaggtgtgagccaccgcgcccggccaggaggtactattattgtcagtgtcactatgtcaagcggggaggaggcagggatgtcaggcagatcacaccacagctaagagctgcccctgaactccccttcccttcacttgctcccctagagaatgccaggctggccagccagcatgtgtgggcctttgccctacaaagggagttcactccggcccaactcgtttttgcctttgatcctcccaacagctgtggagtaaggcaggcagggtatattatcacatatacccatttgatggatggggaaactgaggtggggtgcaggatggtgggggtgtctcactaagatcacccagctcattcatggcaaagctggccaggtgtagtggctcatgcctgtaatcccaacactttgggaggctgagatgggaggatcacttaagcccaggagttcgagaccagcctgggcaacatagcaagcccatgtctctacaataatttaaaaaattagccgagctgagcatggtggtatgcatctgtggtcctagctactcaggaagctgaggcgggaggatcgcttgagcccaggaggtcgaggctgcagtaagccatattcatgccactgtactccagcctgggcgacagagcaagaccctgtctcaaaaaaaaaaaaaaaaaaaaaaaaaaaaagaccaagctgagccgtgcaaccaagtagcccagttcccaggctaatccatttgctctgaggtggtcccttgggaagccatccttgactccccccaaaaaacatttcctgcttcaccccagcatctgtcccagcacccacaaaccagatgagcttctttccagcacacagactccaccaggaggtgccagccacccctcaggctccagccagagaagaatgtggcctgaccctccccgtgggagctctggccagcaggccttggcagaagtgaggccggctgagtcaacaagaggctggcaggggctcaagctgcccactgagggggagtcagagacccagagggggctgcctattctccaactctcactctctgcgagatcccccctcctgcttggtaggcgccagccagcctggttaacccctgcagacccaatcgaggaatggcctggtgagaatccactgtcaatctcctttggaacggtggtgtgggacttcaggtaggtcgcttcacctctctgggcagttttcttgcctgtgagatcctccacttgcccatgaggatgttgtcagagtctttatgaattcataaagatgactctgcacataaaaccctaaaccatcgcgtcccctctctgcagcctgggagtgtgaatttctgagttcaaaggcagtggctgggccgggcgccgtggctaacgcctataatcccagcactttgggagtccgaggcgggcagatcacctgagctcaggagtttgagaccaccctgggcaacatggtgaaactccatgtctactaaaatacaaaaaattagccaggtgtggtggtgcgcacctgtagtcccagctactccggaggctgaggcaccagaatctcttgaacctgggaggcggaggttgcagtgagccaagagtgcaccactgcactctggcttaggctacagagtgagactctgtctccaaaaaaaaaaccacaaaggcagtggctgtgccctgctgccaggtgctgaactggtgcttcatgagtgtttgctgtgatgtgaaagttaagtccatgaaacaaatgagaaaagtacaaggagtttgagcctctgcaatgattatgacacacccgcaacctgtgtttctaaagctcctttcgcagacatgtttgatcacaggcattgtttgtttgtttgtttttgggtgttttttggttttttttgagacacagtctcactctgtcaccaagctggagtgcagtgacgcgatctcagctcactgaagagctgagatctctctctgcctcccgggttcaagtgattctcctgcctcagcctcctgagtagctgggaatacaggcatgcaccacctcacctggctaatttttgtatttttagtagagacgcggtttcactatgttggccaggctggtctcaatctcttgacctcgtgatctgcctacctcgccctcccaaagtggtgggattacaggcgtgagccaccacgcccggcccatcataggcattgttactcccacttgacagatgagaaaactgaggcacggggaggctaaagaacttgcccaagatccacaactggtactacttggagccaggtcttcttctgactttctgcaaagggaagcatctggggaactctctgttctcagaggtggaaagaggagcagtgagcagaggttatgacgagttgatttctgctccatttcagggagaaattcttggctggcagagctgtcctcttgggggagtggtgagcttccagtcaccaaagggatgtaagtagaggcaacagccatcagtcagggttgcttctgaacaattcctgccccagaaggatgtgtatacaggacgtgaggttcctcctcacccctggagaccggaggagatcatggtccctctgagcgtggtcccagagcctttgccctcaaggcagcaggccactgagaggcgacagacctggactcaaatccagcgtgaccatttccaagccatgagacgttacttcacctccttggcctcagtttcctcatctgcacaatggcgttgtgaggatcagagcaaatataagtggaacttcaagctctgagctgtgtctggcaatcaggagatgctcagttaatgctcctcctgcttctgctcttcttcttatcatcaatccaggaaagagaggaggaaaccaggagctaggaagcaggtttggggcataggaggttgctgggtgaacccaggacctagagccaggagcgccaggtccgactcccagctctttgatgaacaggcaggtgccatgggcaaaaggtgtgttcccttgtccatttctgtctctgccacacaaaggagatcatgaacatggaagtgcttcattaaccaaagtggacgggcttttgttagaagaaaacagagagatccacgtgtccaggaatgagcgcgtggccatgggggtgaggaaggcgcccccacagcccacccaggcagggccacgtgaagcccccagggctgggccaggctggaggaggccatgcaggagatggtcagggcaaagcaggactggcctgcagcccaagggcctatctcttaggccagggtgggccacagagaataggccattgtttctgctcctcaaatacttttcctgtcccccctccatgcccctcctctctccaccccacccacctcacagtgagaacaaaggtctcctggaggacccctccccaccacccttccatccaggccccgaaccacctggcccaggtctggagagcacatttctatcacccagggacaacagggtcacctggccctgaccccttctgctgcccctcccgccccctccaactgcagccaccgcggacccccactccgccttcagtccatccatctgtctgtcctcctcaggggtggggctggaggaactgaccccacatccttcctcaacccccctccaacttcttgctctccaggagaaagggagccagaggggttgggggggcctccccacccccatttccctgcggatcagtgaacaagaaaccagagctgggtcggcctggaaggctccgcctgagaaagctcttccacaggccagcccttttcccagagcctggaattccagaggcgtttccggctctgacagctgtctcctggagacgtgccctccccgtgggcctcacagccacgccctccaaaatgcccctgggattaactcccatcctgaccctactgctcccaagaatccttttgcacccagacatcacctcgaggagcagctgggtgacacagatagggacgaagagcagctgggtgacacagatagggatgcatctgccatcacccggcacccaggctactccctagcctcaggccaggccctgactcccgcacatctcagccatcactgcagctgacacaccttggccgcatatacccgagtcagacacacacacttagagtttccagcctggctctcactgtttgcacacagcctcatacatctatagagcctcgctcatcctacctcctccaggcagtcttcctggaagccctgccaagtcggtgctgagccttacctgtctgtgagcctgtttcaccctgttagtctgagagatggcatacactcagcagatgctcacccacactgaagccagccatggagtgtgtggcagcccaggactccactgcacactcgcatgcaaccccgacaagtctattctctctgggcctcagtggcctcagaagccttatttttttatttttatttttttcagtcacccaggctggagttcagtggcacatctcagctcactgcaacctccgcctgccaggttcaagcgattcctatgcctcagcctccccagtagctgagattacgggcgtgtgccaccacacccagctaatttttgtatgtttagtagagacggggttttgccacattggccaggctggtctcaaactcctgacctcaagcgatctgctggcctcggtctcccaaagtgctgggattacaggcgtgagccactgcgcctagcacccaggagtcttctgagaaccctgaaaccgccccctctcaccccaccaagtgttaactcgtggggatctggagtcagaggaaggaaccagagagccgaagggtccttccaggagggtctccatctcctggctctttcagaacacattcctgtcatcaagggccacaaggcgaaaaaaaaagcaaaacaaaaaaacagcattaggcagggttgcccccagcctctgctaatgaggaagccccatcaaggatcctgagtcacccccgggtctgtgatccccgagggccgccatcactgagtggggcagtggcccagcctagcacccgacactaccctccccgtgtgcggcattcagtgcctctgcctgcgtcctccacagtagacccaacttaacttctagccttccagaaccagatcatgaactcaggtgtacccattcccacctccacctctctgctgaagcctgttctctccccaacttcacctacagacaatcttaccccgagacagaatgcccaactcaagtgccaccttctccaggaaggctccctggccctcctcagtcggtcttctgcctccctggtcccttcaaccgctgctttgacctttcatcactaccagtctcctggcctctgtcttccccagcagactctaagtatcttgaaagtatggcccacgttccttaccgctgccccctcacaaggtgctcagcccagggctctgctgcagcaactacccatttaccacgtgttcacggaaactgcctactggtaaaggaaaaatgataaagtcataataggccgggcgcggtggctcacgcctgtaatcccaacactttgggagcctgaggcgggtggatcgcttgagcccaggagttcgagaccagcctggccaacatggcaaaaccccgtgtctactaaaaatacaaagattagccaggtgtggtggtgggcatctgtaatcccagctacttgggaggctgaggcacaagaatagcttgaacctgggaggcagaggttgcagtgaaccgacatcaccaccactgcattccagcctgggtgacagagcaagactccatctcaaaaaaaaaaaaaaaaaaaaatggtcgggcacagtggctcacacctgtaatcccagcattttgggagccaaggcgggcagatcacctgaggtcaggaattcaagactagcctggccaacatagcgaaacctcgtctctactaaaaatacaaaaattagctgggcgtggttgcggactcctataatcccagcttctcgggaggctgaggcaggagaatcgcttgaacccaggaggcacaggttgcagtgagccaagatggtgccatttcactccagcctgggtgacagagcaagacttgatctcgaaaacaaaaaaaaaaaaaaaaaaagaaaagaaaaggaaagaaaaaagaaaaaaaaagtcataataacagctacccttccttgaccataactacaggtcaggcaatgaactttatggcttattacagataatggagctgagaccaatgctggggactgacttatccaaggtcactctgctagtgagagacaaagtcctgatttgcactcagggttgtctgacttgggaatgcacactggggagagcatgggggtcagcctccttggcccattgccagtctcccctaggtgtgaggtcacctctggagaactaggtcacagcacaaacctcttgaagagtccaaagctgcccccttcccctgcagtgcccaggtgtgcctgagcccctgcaggggtctagccagtgagtatccctggattggtcccaggaggagagtacctgctctcatttggctcagtcaaggaacgatgaacaagaattcctatgttggtcctgatcattcatttcccagtgtgccaggagcacagagcgtgcacagacatcactctctcatcagcgatctcagcaggaaatagataccaacatggaggatggaccggatgcagtggggaggctcattttgaaggagttcttccagaagaaggtgacatttcaaagcagtcttcagccgggcgcagtggctcacgcctgtaatcccagcactttgggaggccaaggcgggtggatcacctgaggtcaggagttagagaccagcctggcccacatggcgaaatcccatctctactaaaaatacaaaaaaaaaaaatagctgggcatggtggtggatgcctgtaatctcagctactcaggaggctgaggcaagagaattgcctgaacccaggaggcagaggttgcagtgagccgagatcacgccattgcactccaacctgggtgacagagcaagactctgtctcaaaaaaaaaaaaaaaaaaaaaaagcagtcttcaagggtattttgcctccaggtaacctgctgatgaggtgagtgaagtgcatgtgtgtgagaaagatggggacgtgctcagacacccatactggtcagcagagaccaggcgtgagtcagtgtaagggcattacaggatggaagtggaaggagtagatggacaggtgggtgagtagatggccacgggtgtgggcagtggatcaaacaatgctgggtagagtgggtgggtgggtgtacaggtaggtaaatggatgatggggtggaaggatgcatgggtgtgtaggcggctggatgggtgcataagtggatggatggatgaatgggggataggcaatgggtcaatggaagggtgggtaagtaagtggttgagtgattggatgtatgtgagtagcagatcaagacatggacaggaagtaggtgggtaaatgggtgcatggaagggagggcagatggatggacaggggagtgggcagtgggtagatggatgaattagcgatcgcatcgacagatggatggaccagtggacactcaagagctggagaacgggaaagaccaatcagtggtcaatgagcagatgcattaactgaccaaaagcccagccagactttggggtacaaaggggacatgcaccctagggaggggctgatagttgtggcctcagttgaaggctcccatcccaaacctccctggaacctggaagcagccactggcattcctgggtccccaaggaggaaatacttctccgtagctctgccctgccccctcctccctggctccatagactgctccctgcccaggacctgcctccttcccttaggccccttgccttggccaacccaatctgctgggctgagtggagggggcagctgagccctgggactatagcctgaggagcctggttccttcaagacagggaggtaggggatcctgagctctgggcggttggttcacctagcagctccccgtccccagctgggaggcatttgttctgcattctgcacgatgattacagccctgccaaggttaacccctgcactcctgggcacagcctctcaaagggaaggaaggggaccgcaggaaattgggggaggagaaaagcatgataaagggagactgcccaaccctggatccttcttggggatattgaaacttctccctttctcccgttttccagagggaaaaactgagtcagatccttaaatcaggagtggagccaggaacaagggcacagcctacatggagataggtttctatctggaggcaggctgcaaaggagggagagggctcctctctgcctcagcttacccagatgtaaaagggggcaagaattcctgattcacaggttgcctgtcaatgagctggagaagacaaagcgtgtggcatatatagtagggaggttctcaacctcttgttctttcctgcctgccctccctgcccgcgggtgaagaagatggagcaagcatggggcaggttgtaaccacttccatcaggactgcttgctcagtcatctgcctggggctcacaacaccccaactagtaaatacccacactgctattatacccatttcagagatgagaaacttgaggctcaaatgggccaagtgctttgcccacggtcagccactgggccaggatttgagctcagggcctttgacattgcaccagactgcctcctttaccagccgctctagggatcctctgactagagtgacgtgtaattgattgtctaaccaggtcacctttgagaatgaaaggaagtgctattaataattacactggaacagtatgtgtaatctgggctgtcctaggcaaactggaaagtatggccatcctgccaaagtagggagctttacgcaaatcacttcacttatctgcaaaagggacaccatggcaggactttccctatggggctctcacaagaattaaatgtcataatgcatgttaatgagctacaggacctggtatgcatcaggtgctcaataagtgctggttactactgatgctattaatagtaataaccacagtagcactagttctttgtttccatcactgtccttccagtccattcttcactcacagtcagatttctattttgttttttgtttttttgagatggggtctcgctctgtcgcccaggctggagtgcagtagcacgatctcagctcactgtaacctccgtctcccagattcaagcaattctcctgcctctgcctcctgaatagctgggattacaggcgcccaccactatgcccggctaatttttggtatttttagtagagacaggatttcaccatgttggccaagctggtcacgaactcctgacctcaagtgatctgctcgcctcggcctcccaaagtgctgggattacaagtgtgagccaccgcgcccggcacttttttatttttattttttaagatggagtctcgctctgttgaccaggctggagtgccgtggtgcgatctcagctcactgcaacctccgcttcccaggttcaagcaattctccctgcctcagcctcccgagtagctgggattacaggcacccgccaccacgcctggctaatttttgtatttttagttgagacggagttttaccatattggtcaggctggtctcaaactcccagcctcaagtaatctgcccacctcagcctcccaaagtgctgggattacaggcgtgagcaaccacgccgggcaacagtcagtcttctaaatgtacacctgccagtgctgcctgctggctcactgtcctgatgctgttccagttctccatgggacaaaatactcctgggccggcccccagggaaagagttcctactgctgtgccacttgagcaaatgctagaatgctttgtgcctctgtttcctcatttgtccagctgcagaaatagctccttcccttggtggccagcatggggattcagggagccagtggaagaggcctagcccctgggtgaacagtaaagaccttgtctcctccacctgcgggtaaatacagctcctcatccccggccacaacagcgctcagccagtctccttcagccgggtttgcctccgctgcagggtcctccactcccagcctttgctgtgctgtcccttgccagctgtgcactgtgcatttccactgcccttccctctgcctacacgtcctttaagacttaactcacaaccatgcagtggctcacacccataatcctagcacttgaggaggccaaggcaggcggatcacctgaggtaaggagttcaagaccagcctggccaacatggtgaagccccctctctactaaaaaatacaaaaattagccgggcgtgggtgggtgcctgtaatcccagctagtccggaggcttaggagggagaatcgcttgaacccgggaggtggaagctgcagtgagctgagatcatgccatggcactccagcctgagcaacagagagagactccgtctcaaaaaaaaaaaaaaaaaaaaaaaaaaaaaaaaaaaaaaaaaaaagagagagagagagacttaactcaggtatcatctcctctaggaagatttcctgagcccccaggccctgcaggaagtattagggacctctctgtgccctgacagcccgaggactctatagtcagatgggagtagtcaaaggagggcacaacaacgggaggcaggggccagagatctatctcccctccttgaggatggcacagggtcccgggtatggctgattccctgccctccatggaggtgggcggggtggggggagggtctgtaaagtctctgagatgcgacttcatttacctgccgagcaagcctcctaggtgctcttggagcaggaaacacttcacacaacatctgatgctgctattatctatcccactttcagatcaggaaactgaggcagagaaaggtaagtagtgactgaggcaggacaggagcccaggctgtccggctccagggtcccggtcttgacggccactctaccccactctaccagtcgccccagtatggctgtcttcctcctgggcaccgcggggcctgtaccggatggaagggaatgagaatggggagcaaaggagtgggcatgtcatgcctgtaaacatcaaggtttaaaggcccaggcattcaaggcctcagatcgagcttcccggttccccgaactcccgcagggcgcggctggagggcccaggagggaggagagttcatcaggcctggacgccccaagcaaggccacgaggggaaccggtggaagaggggttggcggccggggaccggagtcgcctccccggggcagcccgcacgttccccggctggccttgtccggggtggcgagcagaggcctggcctggccccccagccgcgtccctgccagctctcggcggccgcgaggacggtgccggggagggggccggggagggggccgggccccgcccgcgggcgggaggagacgggcgggaggcgggagcgcccacaccccgcccccgcccccggatccagcccgcggagcccgcggccagggcggcgcagaccggcccagcgactctcccgggctgccagccgggacgcgcggccgccgccgctgcagacgacgagtccgccctcgtcccgcgcccccggggctcgcggagccaggtaacagcccgggcgcgcgggtcctcggggcggaggccgtggaggccggcgggtcccggcgcccgcggggactctgcaccctactaggctcccggggccggaacggggacgggacccgcccgggagaggcgcccccgggtgcccacaggaaggccgggcgcggccgcggagccgcgcgaggaaactccgagctttcgggcttcgtgtcccgttccaggctggtggagggggcagaggatcggacacggctgagcggccaaaatgcgcgaggagggggcgagccgaggggcagagcgggggctgtctccgcgccttcctgcgcgggggaaggaagggccggggcgggcagcgggcgacgcggcggaatgtctcccctccgccgaggcccacgcggagagcgggaagtggggggtggggggcccggggagatggacaggcaccctgcccccctccccgaccgccgcattccaggctggagccgcggatgaggtcatcccgtccggttcccctccggccaagacagccggtcgtccccttcccccgcggagcgaccctccgcgtcctgagccccgtccccccagggaatgttggatggccgaagtctttcccggacttccaatcccggccgccctccagattgttctgcctttgccccagcagtgccagacccgcaacattcgaagcccttttcctagaccgggaaactgaggcttagagagtaggggggactggccgggaggccgcagcggcactaaacgtggcgcggggacccgagacgcggcccgcagccgctccgtctcgctcggtcccgggctggttcggctctaactcggggcggtgggcacgaagcgcgtctcctttccactttccccgtcgctccctaatggcccacggtgccccccttggaatacggaggaccgggtcccctagcgcgactgcgaacaactagctaccccgttctggcctcagtttccccgtctctccaccttgaagcgtctggactttgaggagcaggagaagtcagccgaccggtttaaccccttattccagggaccagagcaggtttgggggagctgccgtaaccatgacagggacccgctgtccagcggtgggggggggcgtcacccagctggatgcccgcaggaagtgggctgtgtgcacccgagcagtggcctccaggatgagacgtgggcccctggccagcactgcggcctgcgggtgacccccaggtgaatgccagggtgcagccgcccccgctctccttcagacccgcccttggcctccccgcgaccacatgtgcctccacagcgacccctgttggcccgatcccggctccaaaacttgttcttgcgtcattcccaccattgagtgagctcaggccatgtgcccaggccctgactatcctctatagggtaaatataaggactccaaggacactgaggctgtgtggtgacctccttgcccaggtcacaggcagtgaatctgcagagctgggtctcctgtcttcccaggcctgcacctgcaccccacaccgggctcagcactgggcatccaagccctccaaatcgtcttccccattccccatcgtcttcacccccaccctggggcatttaccagcaatgttggtctgtgactgagggtaaatgtctcctttctgagcttcgttttttccatctgtgaaaggggtgttctgaacactaacgggcggtgttcctgagcaggtgaggggaggtgagcctggcaccaggacacttggagccctgcttactccagtgccaggtgaggcacacctgatggccagcagtgccctgtggttggcagcaagtgccacgtggctgccaccggggtccctggaatgagagatgttagtgtaaaggtgtcagatttgaacccatggctgccctgctccagtatctgagggtttcattacattttctacccttgcaactcccctgggaggggaactgcctggtgtgctgttccgttttccacatgggaagaccgggtcccaataccctgccctcagctccacagcgctgcagagtctctcgaccgcagtaggcagggtagtgtgaggggtgggtactattgggggggtgcccagaaacatttgaaagatgggatcatcgcaagattggggaggaagctggtcccccaagtcaaaagtgaccatgggggttcaggggggaggagccccttttgctgggagatgaggtgctgcctcaagaagtcagggaggccaggtgtggtggttcacacttgtaatcccagcactttgggaggctgaggcagcaggatggcttgagttcaggaatttgagaccaacctgggcaatggagtgagaccctgtccttacaaaaagtggaaaaacttagctgagcatggtggtatgtgcctgtagtcccagctactcaggaggctgaggtgggaggatcgcttgagcctgggagttcgaggctgcagttagctgtgatggagccactgcactcagcctgggtgacagagtgagaccctgcctcaaaaaagaaaaaaaaaaaagtcagggagctggggtgggagcaagtgggtaaggccacatggcagacccttctacaggacattgtacagaggaacacccttcccgctcccattccttcccccagagatgcatccttaatccctgctgagcagggaaacttggccctgccatgaacctgtcacttaaccttggacaggtctcccttccctccgaacctcagtgctgcctgtcaaataggccacgctgcggctttgcagggttgttggagaatcagatgacatcatgtaatggttggccaactgtggatcgcttcagaacttcagcaaacattccacgaggacttctcggtgccgggggtgccagggagggaagaagatgattcagaagttcccccccacgagggggaggagttagggttgggggaggatcagatggtgggaagggaagagaatgtagtcagaaaacaaagcaagctttgtcctattggcttctttgttcttatcttgttatttaacctattttgaatttcaaataacattagaagggcagtattgagatttctatgcttggaggtggcagcaatggttttaaaaaaggaagaaggctgagccgcagacataggtgttcttaaggatcattattgacttttatcagctgaggtcccaggtctgtgtaggtaagtgacttgcccaaggtcacattgtgaggacacagagcccagcctgccctcccactctcagaaggggccagggtgatgttttggcatgcaggttatcatggagatctgtgattcagctggcattgatttggcacttgttaagtgcagagcccaagctagatgcccaagggagaaaggcaggaaaatccaggcggcctccccaccctccaagtgcattgccgatctcgggaggcgagactgggctccacaagccagtcaagggcttatgtgagtcagaggctctgagttcaagtctcaactagctctgtggatctgacctctagccagctttgccctcagtgggccacaggaaaagcataggatcacaggtgcgctctagcctggactttgtatgacactagaaggaaaggggtcagaacaagagatgcttagagaagctggagcaggggaggatgtgtgtgtgtgtatggtgggggtggggaatcaggaaggagagatgcacaagaaatagcttttggcaccagctgagctttttccaaagcttgctccctgacagcaaggctcctacgtcagtttgacaaactgtgataaagtcttttcctgcgggccttctcagagacttgaatatgctcacgcatggaggaggcagctggaaaaagccacttttgaccacaggatccttattccaggaagctccttgaaggtggatggttcagaggaacctctgctctggctgtttacccagcttcacaaagctttggtgaggtgtctgctccctcctggcttcgctgcgtggcagagattttaatgcacagagaagggaggtgacttactcagttactcagcaggaggcagtgtagcctggggctccagggctctgggatgtggggcctgtttcaccatttcttactacgtagcctcaggcaagttacgtcactttgtgcctcagtttcccctctctaatctcatgctgccctcaggagtaatgtttttgttgttgttgttgtttgtgagacggagtctcgctctgtcgcacaggctggagtgcagtggcgcaatctcggctcactgcaacctctgcctcccgggttcaagcaattctcctgcctcaggctcctgagtagctgggattacaggcgcccgccactacgcccagctaattttttgtatttctggtagagacggggtttcaccatgttggccaggctggtctctaattcctgacctcgtgatccacccgccttggcctcccaaagtgctgggaatacaggcgtgagccaccgcgcccagcccctcaggagtattgtatgggtttaaacgatgaggcgggtgaggtcttggcacttagtaagtgcttcataagtgggccctgcagaataagtgctttcttttttttttccttttttttttttttttttttgagacaaggtcttgctctgtctcccagactggagtgcagtgacacaatcatggctcattgcagccttgacctcctaggctcaaaggatcctcccttcttagcctcctgagtagctaggaccacaggcatacaccaccacacccaactaatttttttaaaatttttttgtaaaaaccaggtctcattatgttgctcagacttagaatgagtgaatgagtgcttctattttttcctgatacatggcttaagtgtatagctcaatgaattatttgtcccctattcagtcagtacctgctcagaggctgccatcattctgattgctaatagcatcaattggttttgcctgttactgaacttccttgtttttttttttttttttttttttttttttgagacggaatgttgctcttgttgccgaggctggagtgccgtgatgtgatcttggctcactgcaacctctgcctccaaggttcaagtgattctcctgccacagcttcctgggtagctgggattacaggtgcgcaccaccacgtccggctaagttttgtatttttagtagagacggggtttctctatgttggccaggctggtctcgaactcctgacctcaggtgagccacccacctcaacctcccgaagtgctgggattaccagcatgagccaccgcacccggctgtgttcttgaactttctatacacagactcacttgggtccccgtgtgcctagcttctgccccgcgtcagttggaggcctccatccgtgtagttgggtgtgatcatctatcctcttcagctgctaatgtttggaccccggatttcctcctctgtcgcgggcctgccgtcaccgcccattctgtcttccttccaggtctccacctctgggcaggagagttgccgaccacctcgggggtgctttctctgcgcttgaacatctatagctgcttctgaggggctgggagccgggcccctgggagagacgagccatgaaccccccacagcctctgcatttggggacctcaccttaggagagtgccatttacagcttccgccagggcaaaggagctgagcagccatcccaagcccagcccacctccctcccccggcccctggtaggcatggactagcagctgtgagcagccagagctgatgcccggcccccaggggggcagaggcgccgccaccatgagcctgggcaagctctcgcctgtgggctgggtgtccagttcacagggaaagaggcggctgactgcagacatgatcagccacccactcggggacttccgccacaccatgcatgtgggccgtggcggggatgtcttcggggacacgtccttcctcagcaaccacggtggcagctccgggagcacccatcgctcaccccgcagcttcctggccaagaagctgcagctggtgcggagggtgggggcgcccccccggaggatggcatctccccctgcaccctccccggctccaccggccatctcccccatcatcaagaacgccatctccctgccccagctcaaccaggccgcctacgacagcctcgtggttggcaagctcagcttcgacagcagccccaccagctccacggacggccactccagctacggtgagggcctgggccatcttggcccacttttcagaggctgaggctgaggcccagaggggttcagtggctcctccaagctccaagtgagctccaagtgaccacagaggtcaggcccagaccccacatcatggatggggagggggtgcagtggtgggaacaagctgactccccaaaacacctgaggttgagagtgaggaggtggagtttgaattctagctgcccctcacttgctgtgtgacctgggcaagcacatccccctctctgggccttagctgaaccagtcacccacccattcttgcccccttcaaccaaagccttcccctcatgtcggaatgatatcatggagaggtgaagggcctgggctctagattccaatccagttctgcctgaatttcaggaagtcagttgacctctataagttcaagtcctcgcctggataatgagtctctcggggtcattgctaagattcagtgccaggagaggcgcaggggggctgatacttagtaggtgctcaggacactggagctgttgttatctgaacttggtttcctgtaactcgacaaatttgggaaaccactcacaggaaccgcaagccacaggccttcctgcccagccagaagtgccaccttggccgttcggtcagagctcacctgagaaccatgggcccctgctgccacctggtggccactccctgccttgcgggagtggctctaacacccctgccccaggcggctgctcagaaccgcactgaggactggtccacagaaacccgattctgtctcaggtctgtagtcctggaagcaggggctggacatgtctgtccttcatttctatacagtcagaccctgattgctggtcccatcctgtgtccacaaaccagctcacgtgctatgggttcacctgcagccatcggccagcgtcatggcagggagccggtggccatggctgaggtcacagttgggactgagaggagatttgagctccagacttgattccacctcgtcagacttctatggccttgggctagctccttcgccccatcccaaactgagcctcactttccccatctgcataatggaaatgaggataatgatgattttcagctttcggggtagacaggaagatcacacaggtgaccatggagtgtattctattggaaagatgggagaaaccgaggccagagaggggagggactagccagaggccacacagcaagccaggactggtcctgtctcccctcctgaattcctggtgagggaccccagctctgagcccactgcccatttctcttctaggcctggactctgggttctgcaccatctcccgcctgccccgctcggaaaagccgcatgaccgagaccgggatggttccttcccctctgagcccgggcttcgccgctctgactctctcttgtccttccgcctggacctcgaccttgggccctcactcctcagcgagctgctaggggtcatgagcctcccagaagcccctgcagctgagactccagcccccgctgcaaaccccccagcccctactgcaaaccccacgggtcctgctgcaaaccccccagccactactgcaaaccccccagcgcctgctgcaaacccctcagcacctgccgcaacccccacgggtcctgctgcaaatcccccagcccctgccgcaagctccacaccccatggacactgtcccaatggggtaacagctgggttgggcccagtggctgaggtgaagtccagcccagtgggagggggtccccgaggacctgctggccctgccctcggcaggcactggggagcaggctgggatggcggccaccactacccagagatggatgcgcggcaggagcgggtggaggtgctgccccaagcccgggcctcctgggagagcctggacgaagagtggagggcgccccaggcaggcagcaggaccccagtgcccagcacagtgcaagcaaacacctttgaatttgcggatgctgaggaggatgatgaggtcaaggtgtgaggggctggggcacggtcccagggccccacctaggtgcagagccggcccctcacctaacagctggttcctaccagaccggagaggggagaagtcatgttgcccctaaacccctccccacctctgcaggacagacatgggagggaggacagggaaggccaggcttgctctgggacttttatgctcccagaggccctgccaaactgaccacctcccccgactgccactctggacctaatagctgttccttaggccccactccatgccacccccaccagctggaggacccagcctcacagtgtgtcctttgtgccagaccaagcggcccgtggggggtggggggcagggagtgtaccacacagggccattgtctcacctcccaaagggaccgcctgcccccagctcatcccagagcgtccctgctgcaaccctgacagccgtctcccaggccgcttccccaacatccccgccccagcctccctcttaccccagaaaggtcaggtatgacctcccggggaggaatcccacctgcctgtataccccagacttgcctctggggcctgattaaataaggctgttttgataaaaggtgtcctgcaagatgcttggggacctgggacaacagcatcagctctgtctgcttcagtcccctcccctccagggagtttagaaagccaaggatcccccatcaaggcccccagcagggaagggaagtggacgcgccaaggggagggtaatgagtaaccaggctggaacgcccctgagataagaggcccaggtgggagcccttatctgcagttccgggaacagcccctggcccaggtgcctgggactcgtgtctgccccataatcccacagggcagcatggcatttgctctggcgatagtgggggcaagtagacagaagcaagtgcgtaggactgttgggagcatgtctcagcctcccaacatggcagccgggtgtcctcatatctgtttcctcctcagtattatgaaaatgccaggagcattaaaatgcacggaaagagaaatgccctccttaggtatcggaagaccggttaaatttagccacaaacagctaacgtgaggtggtgcactccctgtcactacaggtatgcaaccagaggatgtgtggcaggaggcaggatcactacgggacctcaggatccctgagagcaggacattctggatcatggggtgccttcattcagaggtcctcagaccaggggtatcccatgtttttgtaaacttgagggacccaagagagaaaggagtcacaagccacagttcttgccacaggaagactcgataaaaacagattattttgtttgcttttagccctggggcaggaactgcaggtagggataggggaacacacccaagctctgttgatcctggtgtgactcggaagaagaaccaggacagagaatctcggctggaagtcttttattcttttaacttgaaagaggacatgttgaacccgccccttacgctcaggtagctcaggtggctgtgacccagcctgttgggaaaagtcagctcgtgcccatctggcagcttcaccttgaatttgtcactctcaaaggtcactgtgaactgtggggagggagggtgtcaaggaggcaggaggccctggaaatgggccagggcagtgcctgatggctcaaacaaggccagcacctgtgtccaggccaggctctcttccatctgggccctccccttgacatcaccccagtgccctttccccctttgacctcaccttgacctctgaccctgggctgaagcacaggtgatcttcccgttgttcttgcccccagttgctgccgtccaatgagttgcagacaatggtggattcgctgaagcgagggttgaaatgcaggttcagcttgtctgtcccctggcccagattaattacaaagctgcaggagaaggggtagcaggtgaggttcagggctcaggcctggataaagcagcttgggttggaggaccttggttgaccacaagctggaagaatcaaagcttgtgttagttgagatctgtgccttaaaacaagggaggtaacaacctgctcagacttagcactgtggtagcacattccatttggagcagggatcacgctgttgagagaagggtaactgatagtgacagcttcgggaattgggggtggctctcctgggagagagaaatgctatctcttagatatctgaagacctattaaatttagccaccagcagccaacctaaggtggtgagctccctgtcactatgggtgtgcaaccggggttgtatgacttcttggcaagatcactacaggagcctgggctagacctgcagggttcctgaaagtggggcattctgggtcatggggtgtcttcatttgggagtctcagaccaagggtatcacacattttgacaaacttgagggacccaagtaggagaaataagtcacttttcccttagctcctatggcatgcacctgcccgccccctctctaaccaaaagtagataaagcacagttccaagatgcgctgacatgttctgcaggcgagagagcctttcgctggactgtgactcacggaggtggtgaggccgctggttctaaccaagaggatgccagcgagaccactcagcctcccctggtggctgccctggtttaatgctcatgaaatgccagcctgtggccattctgctgggtaaagagggtggtgtctctggggatttgggcgttccctagaggcacctgccccgcagggggccagacagagttccaggggcttctccacctgccccttcaatggctgttggggcaaaagaatagagcatatggcatcaactctgaaattctgcaggtccccaaacctagcctcagacatgaagtgggggccagcaggggtgtggggagaagggtgtgaaaaagggcccattggcctgacgtccctcttgcctgagcacttcacagggctgccctgcctgccccacccgccctgcctattccgggcctgcagactcccccaaccctgaaaccttgctcacccatcagtgccatcggcgatgctgcctgtgatcttcagggttgaccccggcttcatgtccatgttcttaacctcaagttccccctgggccaacagagaaacattccactcgagtccccacagaaaatcaatcccacacttgcccagcagcttcatccacctcatgccaacccagctgcaggtctcaatccccctgcccacgtgaggacgcaggagaccaccaagctggaaagtggcagagccagagcgctctgatcaaggcctcccagagcttccccactccctgccctgttttgctcttatccaccccaacccgaagaggcacaggacggaggctcagtttgcccatctatgaaatgggcagagtgcttcctgcccagttccgcaaagtgttcaagtgatgaaatcacgctgccctcagcagaaccccagaaacaaaaatatgatatggaaaatgactgtatcagaggcacaagatcttggcccacccaaaactaaatctggccaggtgcaggggctcacgcctgtaatcccagcattttgggaggccgaggcgggctgatcacctgaggtcaggagttagcaaccagcctgggcaacatggtgaaacctcgtctctactaaaaataaaaaaattggccggacgcggtggctcacacctgtaatcccaacacttttgggaggccgaggcgggcggatcacgaggtcaggagatcgagaccatcctggctaacatggtgaaaccccatctctactaaaaatacaaaaagttagccgggtgtggtggcaggtgcctgtagtcccagctactcgggaggctgaggcaggagaatggtgtgaacccgggaggcggagcttgcagtgaggtgagatcgcgtcactgccctccagcctgggcgacagagcgaaactccatctcaaaaataataataataataataataataataataaataaaataaaataaaataaattatctgcgcatggtggcgggcgcctgtaatcccagctacttgggaggctgaggcgggagaattgcttgaattctggaagcggaggttgccatgagctgagatcgtaccattgcactccagcctgggcgacaagagtgacttttcatctcaaagaaaaacaaaaaaaaaaggccgggcacagtggctcacacctgtaatcccagcactttggaaggccgaggcagccagatcacctgaggtcaggagtttaagaccagtctgcctaacatttaaccctgtctctactaaaaatgcaaaaattagccaggtgtggtggcacgcatctatagtcccagctacttgggaggctgaggcaggagaacggcttaagcctgggaggcagaggttgcagtaagacaagatcacgccactgcactccagcctaggcaacagagcaagactctgtctcaaaaacaaaaacaaacaaacgaacaaaaactaagaatctataaaactccgcaagtcctatgtccatcaaagtctctctccaagcctcactttccccttctgtaaaattgactaatttgatttattcatttaaaaaacagttgatagcctgggtgtggaagtgtgtacctgtattccagctactcaggatgctgagacaggagggtcacttgagcccaggagttggagaccagcctgggcaacatagcgagactcccatttctatttttgttgttgttgttgctgaatgccagctgtatgacagaccctgtcacaccagggagacaccaccaaccttcaagctggttttgagaggattcaagaacatgtttgtgaaatcccatgcacagggcctcacgtagaccaacagcaaatcacaggaccaccatcatttattgttttactttccttttctttttttgtttttttttttgtttttttgagcagagtcttgctttgtcgcccaggctggagtgcaacggtgcgatctcgactcactgcaacctccacctctcaggttcaagcgattctcctgcctcagcctcccgagtagctgggactacaggcatgtaccaccatgcctaatttttgcatttttagtagagacaaggtttcaccatgttggtgtggctggtctcaaactcctggcctcaattgatctgcccacctcagctccccaaagtgctgggattacaggcgtgaaccaagcccagccttaattttcttttttaaattttttctttttttctggacagtggtctgcccaaatgaccatcattttgattacttgttgttaagattcatctgctccttattttccataggaaagcagcacctgaatttctgtacagtaggagcctcctctagcctcacgatggttactagggaagatttctaagctgggttttcaaagctcattacccagggctgggagcggtggctcacgcctgtaatcccagcactttgggaggctgagtcgggtggatcacctgaggtcaggagtttgagactggcctggccaacatggagaaaccctgtctctattaaaaatacaaaaattagccgggtgtggtggcacatgcctgtcgtcccagctacttgggaggctgaggcaagagaatcgcttgaacccaggaggtggaggttgcagtgagccgagattgtgccaggcgacagagcaagactctgtctaaaaaaaaaaaaaaaaaaaaactcattacccaagaccagttttcgcatctatgaccagagggtgagggttggtctgaccaggacgcaacaggcaccaaagatttagaacaacttatgggaggacacttttacattgtgggagttctgctcactgactttttatttccagaaaaagcatgatctgagatgccctgaatgagctcattggactggggcactttgccagaagtcaagggggcagtggccatgggaggaccctcagtgccctctcgctggcagccgcctcctctctgcagaggaggaagtgacccgctggttggtcacatgtaggggtaggttgttaggtattgctcaactcttccacaggcagtaagttcttttttttttttttttgagatgttgagatggagtctcactctgtcacccatgctggagtgcagtggtgcaatcttggctcactgcaacctccacttcccagattcaagcaattatcctgcctcagcctcccgagtcactgagattacaggctcccaccaccatatctagctaattttctttgtatttttagtagagacggggtttcaccactttggccaggttggtctcgaactcctgacctcaagtgatcctcccctctgggcctcccaaagttctgggattataggggtgagataccacacccagcattttttttcttttctttcttttttttttttttttgagacagggtcttgctctgtcacccaagatggagtgcagtagcacgattataactcactgcatgcagcctcatagcctcctgagctcaaacgattctcctgcctcagcctcctaagtagctacgactatagacgtgtgccaccatgcccagctaatttttaaaatttttgtagagatagggttttgctatgttacccaggctgctctggaactcctgaccctcaagtggtcctcctgcctcagccggtaatacatttttttttaaaggtcttgctctgtcacccaggctagagtgcagtgatatgatcagagctcactacagccttgacctcttgggctcaagcaatcctcccacctcagccccccaggtagcctggaccacaggcatcccacctggcccagctgatttttttttttttcagatggggtctcactatgttgtccaggccagcctcgacctcctgagctcaaaggatcctcccacctcggcctcccaaagtgttgggattacaggtgtaagccactgtgcccggcctggcagtacattttataagagacgcctggaggaggcagcaatgcttaacccaggacagcgggccatgacggcggcatgtcagacaggaggctgctcagaccagagcttctcagccttggccgtctggacgtttggggcaggcatttctttgttggggtctgtctcttgtgttgtaggatgttgagcagtattcctggcctctacccactggatgtcagtgacaccctcccctgagcggtgacaaccaagaatgtctccagacagggtccgttgtctcctgggagcaaaacctccctgctttagagaaagtggggtttggaggctggacacctaactccccatgtctttgcttaacacaacggggttgggtccagattttggagccagacagacgggattaaaatcagtctcttgctggccaggggcggtggctcacacctgtaatcccagcactttgggaggccgaggggggcggatcacgaggtcaggagagtgagatcatcctggctaacacggtgaaaccctgtctctactaaaaatacaaaaaattagccgggcgtggtggcaggcgcctgtagtcccagctactcgggaggctgaggcaggagaatggcgtgaacccgggaggcggtgcttgcagtgagccaagatggcgccactgcactccagcctgggcgacagagcgagactccgtctcaaaaaaaaaaaaaaaaaaaaaaaaatcagtctctcactgacaaagaccattatctctgggagatgaggttatccagtgaggacagtccaaaaggggctcaaacaagaaacagaagacaggtgtgcccgccacacagacactcacagacgtgtgccctgcgcacacacacgtctaacaccaagcatcaggagatggctccctgcctcctgccagcagcctgtgcccacaccccgagccctgcaacagtcaggccaggataggggagctgggcctggactaagagaagcacccacactccccttgcagctcctgggggctgcctgactgaaacagcaaagctcaaaccccaaggatagaggtgggggctgctgcagggcagaagcactcggaagtccagggtcaggggtgcacttggacaaatagggatgctgagagctgcgggagggtgcaggcccgggagccttgtccccacccaacagagtcaaaggcgcagagagagacaggcagaactgggtgggggtgtggtcgtccctagagctgggggggtggggagttgggggcccagactctagtgccgactctgcccctaattggcagaggggcctggggccagcttagcccctttctgggccttggttcccttatctgtcgtataagggatttggatgatatggcctctggagctggagagagaggaaagaaaaggcagaggtgagatgaccaggaaagagaaggtggggagagtccgtgggccacagcagtcctccccgagaggcagagggtgatgagggcatagacccttccacgcaggacccctggcacattcacatcctgcatcccccctgcacttgaatagcgtcccccgaaaattcatgtccacctggaacctgtcaatgtgacctttttttttttttttgagatgaagtctcactctgtcacctaggctggagtacagtggctcgatctcggctcactgcaacctctgcctcccgggttcaaccgattctcctgcctcagcctcccaagtagctgggattacgggtgcccaccacaacatctgtctaatttttttttcttcttcttcttcttttttgtttttgtattttcagtacagacagggtttcaccatgttggccaggctggtcttgaactcctgatctcaagtgatccgcctgcctcggcctcccaaagtgctgggattacaggggtgagccaccccgcccagcctcaatgtgacctatttaaaaatagttcctttgcatatgtaatcgagttaagaggtcatactggtttagggttggtcctaaatccaatacgaccagtgttctcataagaggagagaaatatagacacagagacggagacacacagaggagtccacgtgaagttggaggcagagattggagtgatgcaagccaaggaatgcgaggagccaccagaagctggaagaggcaagaaagaaccctccccttgcgccttcagcaggagcgtagccctgtagcaccttggtttcaggtttctagtcaccaaaaccaagacagaacaaacgtctatcgtgtgaagccacccacaatttggtggtaatttgttattgcagccctaggcaatgaatacaccatctaatcctcagaagaggcagcctgtgatccccttccacagatgtaaggaagactggggctcagagacggtcagtgacttggccaaggccacacagtaaagctgtggcagagtctggtgtagaatcaacgaatcagagacctcagtgggaatccactcaaccccttgtgatttgcagcttgtggccttgggcaatttgctctccaagacttgggttttgtgtgtgggtatatgagacaaggtctcactctgttgcccaggctggagtacagtagtgcaattacggctcactgtagcctcgacctcctgggctcaagtgatcctcagcctcccaaggctgaggagtgtgccgctacccccactaattttttaaggcaaagcgtagtggcatgcacctgtagcagaaaaggtctcactatattgcccaagctgagatttttttttatctctataaagatcaatggaggccaggcacagtggctcacacctgtaatctcagcacttcgagaggccaaggcaggaggatcccttgaacccaggagtttgatatcagcctgagcaacatagtgagacctcatctctacgaaaaataagaaataagctgggtggggtggctcacacctgtaatcccagcactttgggaggccaaggtgggcggatcacctgaggtcaggagttcgagatcagcctgaccaacatggtgaaaccctgtctctactttaaaaatacaaaaattaggccaggagcagtggctcacacctgtaatcccagcactttgggaggccaaggcaggtggatcacctgagatcaggagttcaagaccagcctgaccaacatggagaaaccccatctctactaaaaatacaaaattaatcgggtgtggtggcccatgcctgtaatccctgctactcaggaggctgaggcaggagaatcgcttgaacctgggaggtggaagttgtggtgagccgagatcgtgccattgcactccagcctgggcaacagaaactccatctcaacaaaaaaaaaaaaattagccaggtgtggtgacacatacctgtaatcccagctacttgggaggctgagaccagagaattgcttgaacccaggcagcagaggttgcagtgagctgagatcgggccactgcactccagcctgggcaacagagcgagactccatctcaaaaaaaaaaaaaaaaagagaaagaaaagaaacaaacaaaattagccagtgtggtagtgagtgcctggggtcccagctactcaagaggctgaggtgggaggatcatttaagccaaggaggtcaagtccgtagtgagttatgattgccaccactgcactccacctggtgacagagcaagatgctgtattgttgttgttgttttgagatggagtctcactcttgttgcccaggctggagtgcaatggcacaatctcggctcaccataacctctgcctcccaggtccaagtgattctcctgcctcagcctccccattagctgggattacaggcatgtgccaccaggcctagccaattttgtatttttttagtagagacggggtttctccatgttggtcaggctggtctcaaactcccaacctcagatgatccaccagcctcggcctcccaaagtgctgggattacaagcaggagccaccacgcctggcccaagatgctgttttttaaaaaaagacctctgtccaacttctttgctgcacagatggggaaactgaggcccagagagggacagcaatggttttccctaaaagcccccacccaggcaaagacaaagatgaacagagtggggcaggcagcagggggctagtgtcctcaccgtcatggtgacagctcctggcggcagctcccagcggctcctggaggcctgtgctcagggtctcaactcgtggtcaagcttatatcctagaatattacacattaactccctcaaggtcctaggtgaggactttgccccttctaccttgtgtctccccgcctgcatctcccagtacccagcacaaacaggcagaagactcctcagccagctccaccccacccagcccggagcatcctcctggcctccctccagcccagcctccccctcctcagcgctcccagagcccgagaggggaagcagccccagctctgcccccacacaaaccgcaatgcagccgcttgacagctctcccagcctccctcacttagcccagcttccttgcctgtaaaaagagagatttgctttgcaaaaaaaaaaaaaagtctaggtttctaattttcttttttttttttttttgagacagagtctcactctgtcacccaggctggagtgcagtggcaacgatctccgctcaatgcaatctcctgggttcacaccattctgctgcctcagcctcccgagtagctggaactacaggcacccgccaccatgcccggctaattttttggtatttttagtagagacgaggtttcaccgtattagccaggatggtctcgatctcctgacctcgtgatctgcccaccttggcctcccaaagtgctgggattacaggcgtgagccattgcgcctggcctaaggttctaattttctatgatgttatgattcattgtcagagagcattatgttttcttcttccctccccatattatttatctgatcggacatgtaggtttcaaaaccaatacacggattcaaagaaaagatttcaaactatttacaacaaatggtcaaaagcagaggagagctgggcgcggttgcttaagcctgtaatcccagcactttgggaggccaaggcaggcggatcacctgaagtcaggagtttgtgaccagcccggccaacatggtgaaaccccatctctactaaaaatacaaaaattagctgggcgtggtcgcacctgtagtcacagctgctcaagaggctgaggcaggagaatcgcttgaacccgggaggtggaggttacagggagctaagatcgcgccactacactccagcctgggcgacagagtgaggctccgtctcaaataaaaaaataaaaaataaataaaagtgcagaaggagtgggagggctgagtgggggacatggaggatgaaaatgctttgctcttgacttctgttacttatgtaactggcatgcttactatagacaattagagatattaaataaaaagaaaaataatcactcataatgccaccgccacgagggaactggcttacgctgttggcacatttccttccaggcggttctccacagatttacattatagacacccctctgtctgtgcaattgtttatctctcttcatttgggaaacattaaagaccacaaatctatatttcagaaccatactttaatgcctgcgaaatagtctacctttcaacgactgaatttatttaaccaatttccttctgctgaacactcacattaattctacatttttgctattaaaaatactgctgcattaaatctatttggacataaactttggctgcatcgtgacaacttatgtagggcagattcccagaaggagaacttttctagagctcaggatttggcgagccagagcgttttccatcagagttggcggtggccactccgggcaggatgtggggaactggccttgccgagggccctcggtgccaggagtctgcaggtggctcactgcccagtgcccacataggacaccaccttcagtcccctgccagcccggagtgaggagtgacttcctcctttcacccacaaggaaattaatcctctctcggcctttctcccaaaggcatggtaaaaccccagtgagataaggaattttaaaaggctttctccctggaaactaatcaacagaaactataccttttaaaggtggcatttttctgattataataataatattatctcactataggaggttccagaaagtacacacagtaaaaggaacttaaagttcacttgttttaaaataatgttcaaaagcaggggaaaatgaccatgcatatcatttacgtactttgctgcgtatatattttataccaatgaaagatttaaaaaaagaaaaaagaatggctgggcatggtggctcacccctgtaatcccagcactttgggaagctgaggtgggtggatcgcttgagtccaggagttcgagaccagcctgggccacatagtgagaccctatctctactaaaaattttttttaattagccaggcatggtggcacatgccagtagtcccagctactcaggagtctgaggtaagagaatcacttgagccctggagatccaggctgcagtgagccatgattgtgccactgcactccagcctgggtgacagtgacggaccctgtctcaaaggaaaaagaaaaagaacagaaattccaatactcacatctgtaaccttgtcctcttaacaatggctaccttctgaagggcattctgcactttgcaaaccactttcttcagccctcatcgttataagctcatagtacattctcaagggaacctctgttctcaccccatttttcaggtggggaattagggatcccaggactcacgcaactagaaagtagcagagcttgctgtctagcaaccaatcccttgctcaggcgcctgccaaagtgtgtggcactgccctcacttagcaaaaagagcatttgacctccagtgtgaccttgagccctctgtgcggtggccgcctctgagatggccccaatgatccccagctcctggtaatcacacacttgcccaatcagctcccttgagcatgactggacacaggacttgcttctaactaaaagaatactagaatatggcaaaagtcatgggatgtcacttccaaggttaggttacaaaaaaactgttgtcctgctgtctctctcgccctctgctctgctcttgccctggggaagaagcaatgaaaccaccttgcgagtagctctatggagaggcccatgtgccaaggaactgacgtctccagccaaccaccaatgaagaccaggacctgccaacagctacatgagtgaacttgacattggagcttaccccacgccagcctggagacaacttgtgcagccgacaccctgactgcagccttgtgagacccggagccagaggctctcagctaaaccccacctggattcctgccccaaagaaaccatgagaaacgtgtttcttattttaagtccctacattttgggttaatttattacgcagtgatagataactaatataccttgccaagcaattgttattggaaggctggtagacggaataatattcctgaaggcctccctcctggctaaagaatctttggtccatagatgtccacagacattctataatactatactgaatttttttttttcttgagatggagtcttgctcttgtcgcccaggctggagtgtaatggcacaatctctgttcactgcaatctccacctcctaggttcaagtgattctcctgcctcagcctcccaagtacctgggattacaggcgcccacgaccatgcccagctaatttttgtatttttagtagaggcggcatttcaccatgttggccaggctggtctcaaactcctgacctcaggtgatccgcctgcctcagcctcccaaagtgctgggattacgggtgtgagacaccacgcctggctacaaaagatatttttaaattagcttggcacggtggagcacaaatgtagtcccagctacgggagaggctgaggtgggaggttcgcttgaacccaggaggtcaaggctgcagtcggccatggtcacaccactgcactacagtctgggtgacagagtaagaccttggtctcaaaaaatatgtatatattttctcttcaacctaaaagtttatttttttctgattgtataagaaattaaaacattttaggctgggcgcagtggctcacgcctgtaatcctagcactttgggaggccgaggcaggtggatcacctgaggtcaggagttcaagaccagcccaaccaatatggtgaaaccccatctctactaaaaatacaaaaattagcctggtgtggtggcgtgcgcctggagtccaaggtacacgggaggctaagacagaagaatcgcttgaacccaggagacggaggttgcagtgagctgagatagtgccactgcactccagcctgtgcaacagagcaagagtccatctcaaaaaaaaaagaaagaaagaaaagaaattaaaacattttggtgtcatgggcctgaggcatcatgcctgctgagcctggtggtgcacacagcttcccacggggctcctgctattgggagactttggtcctgacatccctgagacccctactgtgtcctctgctgtcctcctcccaaagaacaaacagatcaacaccccggcaatatccattttaactcttgcttccctctctgccgagccctccccagcagcacacagagggactgggaagaccctcagttactggtggggtgtgggaaacacagaggtttcagcaacagatagataatgtccagtcccggctctgtcacctacaagctaagtggccatgacaggttgcttcaagcctcgtttctgcatctgtgaaagggagctaacagcaccttcgtcccagggtggttgtgagaatttttttaaattttattttattttattttattttattttattttattttatttttgagacagagtcttgctctgtcacccaggctggagtgcagtggcgcgatcttggctcactgcaagctcctcctcccgggttcacgccattctcctgcctcagcctcccaagtggctgggactacaggtgcccgccaccatgcccgactaatttttttgtatttttagtagagacggggtttcaccgtgttagccaggatggtctcgatctcctgacctcgtgatctacccgcctcggcctcccacagggctgggattacaggtgtgagccactgtgcccagccttaattttaatttaaaaagttaacctatgggctgggtgcgatggctgacacctgtaatcccagctactcaggaggctgaggcaggagaattgcttgaaactgggaggcggaggttgcagtgagccgagatgatgccattgcattccagcctgggcgacagagcaagactccgacccaaaataaataaataaattatatatatgaccatcaggtctccaggatgtttaggctgcctgagggggggtcccctgctcctgcagctctgatgagctgaccgtccctccttcaggggacttccacagagctctcgcctcatccagcccagggatcttcctgtttaacttgatggccgggtccggggcccctctctacacagcagccactggccatgcctggccacccatccccagctagtgtccctccaggaccacccaggtcccctggagctctggggtcatcccatctcacctgaaatcagggtggggccttgaaggaggaaggaatttggagacttagcagggagtgggccaaagccaccgagctttctccctttctccactcctgcccccacagtctttccaccaaccactggttctttgtaagatgtaaatgacaacattccactctcctgctttaaaccctccaggtttctccttgcacttacagcgaaatccaaactcccctctcagctaaccagccccacacgatcgggtctggtccacctcttagccccgtctcacgccacctgccccctggccacactgacatctctatcccttgaattcaccaggctcattctagtctcatgccttatgtccttgctgttccttccacctggaattcttcctcagctcttggctggattgagctccttatcatgtcagttttaactcaaaagagggatggatggacaatcggatggatggatgggtgctgtgatactattattacataaaataggttttgcccatggtttctaactcataactctcacagcatttgttagtcttttgttataatgttggggtgctttaggcctcaggaacaggcctcagaaaacagaatcaatctctgacctttggctgtccttccttcacctgctcctttctctcctcaaggtaggaatctccccctgcctttctttcttagaacagaaattctggccaggcacagtggctcacacctgtagtcccagcactttgggaggttgaggcgggcgaatcacttgaggtcaggagttcgagaccagcctggccaacatggcgaaaccctgtctttactaaaaatacaaaataattagcagggcgcggtgatgcgcacctgtaatcccagctactcaggaggctgaggcaggagaatcgcttgaacctgggaggctgcagcgagccaagatcacgccattgcactccagcctgggtgacaagaatgagactccatctcaaaaaaaaaaaaaaaacacagaaattcttccgtaaagaaattccctggcagggcgcgttggctcacgcctgtaatcccagcactttgggaggccgaggcaggcggatcacctgaggttgggagttcgaaaccagcctgaccaacaaggagaaaccccatctctactaaaaatataaaattagccaggcgtagtggtgcatgcttgtaatcccagctgctcgggaagctgaggcaggagaatttctggaacccaggaggcagagattgcagtgagccgagatcgcaccattgcactccagcctgggcaacaagagcaaaactccatctcaaaaaaaaaaaaaaaaaaaaaaaagaaattccctgacctaccttgtcataagaccctcatttcagaaggggtcctgctccatcccttggagtaagaaatgctgcacagagaggccaagaagaatctgaacagacgggccttgcgggggttccacacttcgtctagtaatattagatcagatcctttttgcccattcacagttctacacagaggtcaatcatgccggcataataaagtccccataaaaggccccaggggattgggtttgggcagcttctgagatagctgaacacatggctgtcctgaaggatggtgctcccaggtgggaggggaagctctgcatctcttccccataacccgccctaaacatctcttcatctgtatgttttataacatcctttataatagaccagtacacacaaatgtttccctgacttctgtgagccactctaacaaattaactgaacccaaagaggggtcgtgggatccccaacttgaagtccagaggctcagacttgcaactggtgtggagggagaggggagtcagggagagggagctcaggagttcgagaccagcctggccaacatggtgaaatcctgtctctactaaaaatacaaaaattagccaagcgtggtggcacacacctgtaagcccagctactctggaagctgagaaaggagaattgcttgaatccaggaggttgcagtgagccgagattgtgccactgtactccagcctgggtgacagagtgaaactctgcctcaaaaaaggagaaaaaagaggcctggcgtggtggcccacacctgtaatcccagcactttgggaggttgaggtgggtggcttacctgaggtcaggagctcgagaccagcctggccaacacagagaaaccccgtctctactaaaaatacaaaaattagctgggcgtggtggtgcgcacctgtaatcccagctactcgggaggctgaggcaggagaatcacttgaacctgggaggcagaggctgcagtgagccgagatcgggccattgcactccagcctgggcaatagagtgagactgcatctcaaaaaaaagaaaagaaaaagaaaaaagaaaaaagatgcatggttaagtgggtggatgggtgaggaggtggagggaggggtgggtgcatggatggtggatcagcaggaggaattgctcatcatagagccccaaagggtgggtatcttcagggccccaatctggtgcagcacggcccctccctccatccctcctgccccctccctggcttatcatcccagccttttgaaccaggaagcctccgtctcagggccacgccaacttatgcacgtgtggtgctgggtggatttacagaaaagatcatcaggttctgtgtccaccttcttataagtggcaagaagattttccatctctgtgtctttagaaattgaagatataaaccaagctgcttctgtgacttgggtggtccttgagtgctcttcctcagagacaggtgacctgagtcctgagtgcagttccttctccctggcccaggccacacagtctttccatggatagtggagcctttttttttttttgagacagagtctcgctctgttgcccaggctggactgcagtggtgcaatctcggctcactgtgacctccaccttccaggttcaagtgattctcctgcttcagcctcccaagtagctgggattataggcacccgccatcacgcccgactaatttttgtatttgtagtagagacgaggtttcaccatgttggccaggcttttcctgaactcctgaccgcaggtgatctgcctgccttggcttcccaaggtgctgggattacaggcgtgagccacagcgcctgacctgagccttctgcatcttaatcacccagtcacagctgtccatgcgggcgggtacctggggatggtgaggagaggctaaaacaacagaagcaatgaagcaacgctgctcaccccagcattcccaccccacccccagcttctggcaggattatatctgccaaggacaggactatatccgcctcaatctttgtgtttgccaagcagggagaggagcatttatccatctctaatgtggtaaacaaccaaaggaggtcccccgccaagtgcagccctagtcgcaggagcacacccactcccaaggcttctgatccaccctgagcacctatggccactggaaacccccactcttactgaagtctgtccctgggggcaatccccttcctctcacagttggccccagctctgccctgggccacacagattctgctgccatcactgcttttctgatgattgcagtctcaggaccatctgggctgcctccccgcagcaccccgtacatatacaagcctccttcctcaaggggaaacacctatgagcccccagggcctcatctcccagaatcagaatccaaaggattccagaagcagcttggtttaaatggacattttcctgaaggccaaaatcaacaggtacaggccttcagggaaatgtccatttcagaagctgaccctttatttttaggatgggagcaggacctaggtgccgtaatacccttgcaggtcaagttcacaacccccgagacccaccaaccagagcggtcatgaattctcccctaattcccagagcccctggggagaccatgggctgcaggagagcagatgagactgtggctgggtgtccagagctgctgcctgctccggcaccttcatggaatggcattggcctcaagtcctcgctgcctcttactggctgtgtgaccttgggcaggccaggtagcctcagcttcctagagaatgtatgtaatgggcttggcatacagaatatggcacatagtaggtactcaactattattattctgtatttaatagctaattggctggcatttgctcagcactctgcatacattgggccattgcgaggtctctcgcctgcatcttagtttgctaattaggtgcttatctgggaccttcctggagcaggcattctctgctccattctctcctctgtacgcgtgacagccccaacccttgttcccccagcaggagcaaaaggggttgggtatgatgacctccagctcaatgtctaaggatctctgggtttcagtttccccctcggccagctcctcctgcccctaccagccacctcccaagctggggatttcactggcccacctttgttccctgcagaatcctagagtcctccagcccttccctctctggccttcacactccacatcctcagcccagcacaggagccaattttgcaaagaggtaaagagacctcaccactgctgcaccagtctgtccatttcctagcaggcaactggcacttgtttggttttataaattaaggtttcgattcttggccaggcgcgatgcctcacacctgtaatcccagcactttgggaggccaagggtggtggattacctgaggttaggagttcaagatcagctctgccaacatggtgaaaccccatctctactaaaaatacaaaaattaaccgggcatggtggctcatgcctgtaatcccagctactcaggaggctgaggcacaagaatcatttgaacccaggaggtagaggttgcagtgagccaagatggcaccactgcactccatccagcctaggagacaaagcaagactccttctcaaaaaaaaaaaaacaaaacagtttcaattcttgtataatatgttgctagtgggaatgtaaaatgttgcagctgctatgataaatagtttggcagttcctcaaaaagctaaacatggaattaccctatgatctagcaattctactcccaagtatgcacatacccaaaggaatcgaaagcaggaactcaaactaatatttgtaaaccaatgttcatagcaacattattcatcagaccaaaggtggaaatacccaagcatctaccaacagatgaaaggagctaacggcccggcgcggtggcttatgcctgtaatcctagcactttgggaggctgaggcaggaggatcacgaggtcaggagatcaagaccatcctggctaacacagtgaaaccctgtctctactaaaaaatacaaaaaattagccgggcgtggttgcgggcgcctgtagtcccagctactcgggaggctgaggcagaagaatggcatgaacctgggaggcagaggttgcagtgagccgagatcacgccactgcactccagcctgggccacagagcaagactctgtctcaaaaaaaaaaagaaaagaaagaaagaaaggagctgggcatggtggctcatgcctgtaatcccaacattttgggaggctgaggcaggaggactgattgaggcaggagttcgagaccagcctgggcaacatagtgagacctcatctctacaaaaaaaaaatttttttttaattagccaggtatggtggcacacacctgtagttccagctacttgagaggctgaggtgggagaatcatttaagcttcagaggccaaggctgcgagctgtgattgcaccaccgcaccctagcctgggcaacagagaaagaccttgtctcaaaaaaaaaaaaaaaaaaagatgaatagataaacaaaatgtggtatatacaaacagtggaatttttttttttttttgagagggagtcttgctctgtcttccaggctggagtgtagtggcatgatctcggctcactgccacctccgcctcccggattcaagcaattctcttcctcagccacccaagtggctgggattacagacacccgccaccatgcccagctaatttttgtatttttagtagagacggggtttcatcatcttggccaggcaggtcttgaactcctgacgttgtgatccacccacatcagcctcgcaaagtgctgggattacaggcattgagagaagagagacagatcctctcatattgtgttatattgtcttatactcagaaaaggaaagagaagcaaaactaaaggcaggtagcctggcgcctaggaaccagacccgaaagcaaggaaccagacctgaaaccaggcctgggcctgcctgacctaagcctggtagttaaagatcgacccctgacctaactggttatgttatctatagattccagacattgtatggaaaggcattgtaaaaatccctgtcctgttctgtttcgttctgattatcgatgcatgcagcccccagtcacataccctctgcttgctcaatccatcacgactctctcatgcggacccacttagagttgtgagcccttaaaagggaaacgaatcgctcactcagggagctcggctcttcagacaggagtcttgcctgatgctcctggccgaataaaccactgccttctttaactcggtgtctgaggagttttgtctgtggctcgtcctgctacagcatgagccaccgtgcccagcagacaatggaatattatttagctatgaaaaaggatgaagtgctgatacatgctgcatgctacagcatggatgaaacttgaaaacattatgttcaatgaaagaagccaaacacaaaaggacaaatattgtatgattctactcatatgaaatatttgcaatagacaatttatagagacagaaagtagattagaagctatcaggggctgaggggatgggagaatagtggagttactgtttaatgggtatagagcttctgtttggggtgataaaaaaagttttgggactagatagtggtgatggttgcacaatgttataaatgtaataaatgccacagaatcctacatttaaagatggttaaaattggccaggcgctccccgccccggacggagtcttgctctatcacccgagctggagtgcagtggtgcaatctcagctcactgcaacttccgcctcccggttcaagccattctcctgtctcaagaagggtggttgtcaacggggtggtttagatgtttgaagagagaaagcatttacctccccctgctggccactaagagaacaatataaattaggaagaaaaacagcttttcaattgctaaacctctacttaaaaatatgacaattaagacaagcatgtgattaaaacacttcacacagctcaaaagggctttacagggaaaagcaagtctccctcttttctcaatccccacagccaatatctctctcatgcttgtttccagggatattctatgtgctacgcagatgaaaacatgccagacactgactgcgtctttttttttttttttttttttttggagatggagtctctgtcacccaggctggagtgcagtggtgtgatctcggctcactgcaacctctgcctcccgggttcaaacaattctcctgcctcagcctcccaagtagctaggactacaggcgcgtgccaccaccgccggctaattttttgtatttttagtagagacagggtttcgccatgttagccaggacggtctcaatctcctgacctcatgatccgcccacctcggcctctcaaagtgctgggattgcaggtgtgagccaccgcgcctggccctttttttttttttctcagacaggatctcactctgtcacccaggctggagagcagtggcagtgactcaaacatggctccctgcagcctcaaccccttaggctcaaatgatcctcctgcctcagccccccaggtagttgggactacaggtacatgccaccacatccggctaatttttatattttttgtagagacatggtatcgccatgttgcccaggctagtcttgaacccctgggcttaagcgatcctcctgccttggcctcccaaagtgctagggttacaggcatgagccaccatgcctggcctatactggctgttctgtactttggttttattcccttaacagcatatcttggaaattgttccatctcagtgaaacacatttctctttttttttttttgagcagagtctcgctctgtcgcccaggctggagtgcagcggcgcaatcttggctcactgcaagccctgcctcccgggttcacaccattctcctgcctcagcctcccgagtagctgggactacaggcgcccgccaccacgcccagctaattttttgtatttttagtagagacggggtttcaccatgttagacaggatggtctcaatctcctgacctcatgatc

SEQ ID NO: 353 - DNA, 115 bp, Homo sapiens
atgctaaactttttataaaagtttagttgtaaacttaacccttttatacaaaataaatcaagtgtgtttattgaatggtgattgcctgctttatttcagaggaccagtgctttga

SEQ ID NO: 354 - DNA, 100 bp, Homo sapiens
ccgcctgcaacccattttccagacagtaaaaaggcggcgcacttctttctccgtcaggcaccaggtcataaggaacccaagagtctgtgcctctgaggcc

SEQ ID NO: 355 - DNA, 81 bp, Homo sapiens
gagtcttttctcacctttgtcaaataccagatttggcttcgtgctcttctctgtctgggctcatttctttgtccatagact

SEQ ID NO: 356 - DNA, 80 bp, Homo sapiens
agcaaacgcccacagatggcccagaggtggtggtagtcagggtgtgtgggtgtttttagggttctttagtgttgtttctt

SEQ ID NO: 357 - DNA, 85 bp, Homo sapiens
agcaatactttccttctttgaagagaatcccaaaagttagttcatcttaaagtgcaatattgtttaatcttaaaactgggcaact

SEQ ID NO: 358 - DNA, 40 bp, Homo sapiens
tcttctgtcgaatgtgcctgatgcatgtattatcgtcttt

SEQ ID NO: 359 - DNA, 98 bp, Homo sapiens
atttgatttactttttatcctttgttgagactaataaacccagggttactgtaggagctggcaaaggaaaattagcagaatgggccaagcgagaccag

SEQ ID NO: 360 - DNA, 236 bp, Homo sapiens
gctagttagaaaggtttggagggatgacttttagtaaatcatggggattttattgatttattttcacttttgggattttgtggggtgggagtggggagcaggaattgcactcagacatgacatttcaattcatctctgctaatgaaaagggttctttctcttgggggaaatgtgtgtgtcagttctgtcagctgcaagttcttgtataatgaagtcaatgccatcaggccaaggaa

SEQ ID NO: 361 - DNA, 81 bp, Homo sapiens
tcttcctggtgatggcagaggggcttcttttagctagtttgatcttttgggagtctgtctttccttagccgtctgagtgag

SEQ ID NO: 362 - DNA, 76 bp, Homo sapiens
  misc_feature (59)..(59): Each "n" represents a nucleotide selected from a, t, g or c, or contains no nucleotide.
ccccgcaggcgctgtgctagagatggccgtgggtgccctgcaccatgaccctgagcacnggccaagcccggagacc

SEQ ID NO: 363 - DNA, 81 bp, Homo sapiens
gaaagagtgcctggcatgcaaggataagaggttctttacataacatttcctaaatgcttaataaacgtttgttgcacttgg

SEQ ID NO: 364 - DNA, 42 bp, Homo sapiens
cgttcaaattgatcatcatcaaaacttatgtggctttttgac

SEQ ID NO: 365 - DNA, 70 bp, Homo sapiens
gttacatgaaaaaaatttccaatgaagatgtcagcattttatgaaaaaccagaagttattagatgaaagc

SEQ ID NO: 366 - DNA, 170 bp, Homo sapiens
gcttagaggaacttgcctgtgagcgctggtctttgtgtttggttttgtgatgtaacgatctttgctggggttttttgctttgttttgagggaaatgtcttggagtaaattttaagttcctggagttaatttgttttacaggaattttgttttttaaaaaaataggatcat

SEQ ID NO: 367 - DNA, 357 bp, Homo sapiens
  misc_feature (306)..(329): Each "n" represents a nucleotide selected from a, t, g or c, or contains no nucleotide.
aacagtcagggctcagcagccttgttaatggaaagtccccaattcgaagcctcatgcacaggtcggcaaggattggaggagatggcaacaataaagatgatgacccaaatgaagactggtgtgctgtctgccaaaacggaggagatctcttgtgctgcgaaaaatgtccaaaggtctttcatctaacttgtcatgttccaacactacttagctttccaaggtaccagtgaaataattgatttttggtgttgattttcataagctaaaaataaataacagaagaatgttcagggcagatggccttcntaaccagtgcatagtanttctantaaaacagggagcctgttattcttttgg

SEQ ID NO: 368 - DNA, 196 bp, Homo sapiens
  misc_feature (38)..(136): Each "n" represents a nucleotide selected from a, t, g or c, or contains no nucleotide.
aggggtgtttctattgaaactgtactaaatttttgccnacaatttaccttgttaaatattgtagataaattgctaatactaatagccaaatagataacactaatgnctttgtttnaaaaancgaaaaaaacaaaanaaaacaaaaaaacatgagcagtggtgttctaatgaagttatgacatctgtcctaattagt

SEQ ID NO: 369 - DNA, 235 bp, Homo sapiens
  misc_feature (206)..(207): Each "n" represents a nucleotide selected from a, t, g or c, or contains no nucleotide.
atactgaattttattaaaagtatatatacttcaaattcaaagcatcccttaggacccacagaatatattaaaactaccacccttaaattttatatttttgctttaagacagacaatgcaaaggtaactggcaagaggtgagcaaatgttttagaacatttatattattgcttaaaatgagatttgaaattgtaataaaattcttgnntatgaagtctgatgtcttctctgagcac

SEQ ID NO: 370 - DNA, 28 bp, Homo sapiens
caacagggccaccaaccagggttgagga

SEQ ID NO: 371 - DNA, 328 bp, Homo sapiens
  misc_feature (43)..(206): Each "n" represents a nucleotide selected from a, t, g or c, or contains no nucleotide.
gaccctggggtaaagagtgtcactaaaatctacaactactacnnnnnnnnnnnnnnnnnnnnnattgtcatgggcgcctccttccgcaacacgggcgagatcaaagcactggccggctgtgacttcctcaccatctcacccaagctcctgggagagctgctgcaggacaacgncncannnnnnnnnnnnnnnnnnnnnnnnnnnnnggcggcccaagccagtgacctggaaaaaatccacctggatgagaagtctttccgttggttgcacaacgaggaccagatggctgtggagaagctctctgacgggatccgcaagtttgccgctg

SEQ ID NO: 372 - DNA, 400 bp, Homo sapiens
acctgcccctatcactagtgcatgctgtggccagacagatgacaccttttgttatgttgaaattaacttgctaggcaaccctaaattgggaagcaagtagctagtataaaggccctcaattgtagttgtttccagctgaattaagagctttaaagtttctggcattagcagatgatttctgttcacctggtaagaaaagaatgataggcttgtcagagcctatagccagaactcagaaaaaattcaaatgcacttatgttctcattctatggccattgtgttgcctctgttactgtttgtattgaataaaaacatcttcatgtgggctggggtagaaactggtgtctgctctggtgtgatctgaaaaggcgtcttcactgctttatctcatgatgcttgc

SEQ ID NO: 373 - DNA, 217 bp, Homo sapiens
  misc_feature (22)..(32): Each "n" represents a nucleotide selected from a, t, g or c, or contains no nucleotide.
cacgggcccttgggagggggcntcggtcccangcaccatccaggcctggggctcgggcagtcacaggccagggagtcccccaccccgtggtggcctcggtccccagcatctccacccaaggccgtgcaggggagcaggtgcctgctttccctccccttccccaggacccccggggcaggggcagatccagaattgagaaccgcggaagagcagccac

SEQ ID NO: 374 - DNA, 99 bp, Homo sapiens
acagggagcaggggccagacaagccgggtgtccagggcactgccggtgccaccctttgcactcctcatggttgcccagccctccattgtctgtgttttt

SEQ ID NO: 375 - DNA, 82 bp, Homo sapiens
ttagggaagaagccatacctgtacaagaccgggctcttgaaaagaaacacctcgaacccagcccgtgtaagaacagaaggct

SEQ ID NO: 376 - DNA, 49 bp, Homo sapiens
aaaactcccgttctatgatcgttgtagtttgtttgagcattcagtctct

SEQ ID NO: 377 - DNA, 42 bp, Homo sapiens
gcagccagtgattgggatcagccagcgggtgcggatgaactc

SEQ ID NO: 378 - DNA, 274 bp, Homo sapiens
  misc_feature (128)..(242): Each "n" represents a nucleotide selected from a, t, g or c, or contains no nucleotide.
cagaaattggagaaatccttaacacaattttctaaaaaataacagacatttttgttatacattagactatcagacactggacctaccttaatggttagacactttatgcaaaaaaagagaaaggtccnnnnnnnnnnnnnnnnnagaatgtgctaaaatgtccactgaaaacaaagccaagcctctgccctgcctctcccagctcnnnnnnnnnnnnnnnnnnnnnnnnnnnnnnnccaggncaccagactgcaataactggaggcgcctcctt

SEQ ID NO: 379 - DNA, 161 bp, Homo sapiens
  misc_feature (52)..(161): Each "n" represents a nucleotide selected from a, t, g or c, or contains no nucleotide.
tctccaagccatcacagatatctcctgctgctatccccaaactgccactctnaactcttgaagtnnnnnnnnnnnnnnnnnnnnnnnnnnnnnnnnnnnnnnnnnnnnnnnnnnctctaatnagatgtcctaggtcctcccaattcttagnccttttatan

SEQ ID NO: 380 - DNA, 41 bp, Homo sapiens
acatagaaaataatctctctgcttaattgttatctcagaag

SEQ ID NO: 381 - DNA, 77 bp, Homo sapiens
gactactatgctaagggtaaggccaaattgcctgccattgccaattcagcatagacatggctttgttagtgtttcct

SEQ ID NO: 382 - DNA, 374 bp, Homo sapiens
  misc_feature (27)..(349): Each "n" represents a nucleotide selected from a, t, g or c, or contains no nucleotide.
aaattacctgggctgcactgccacaangnntnnanngacagcccccattacttcagtgaagcccaaatttcatcctcatctgttagtcatactcccgttcaccgttctcaactactcatacatgccctnnnnnncttcttnanactgccnggtttncactgtttctccaagacatcacagctgatatctcctnggtgctatccccaaactnnnnnncnnaaactcttgnnnnnaannnnnnnnnnnnnnnnnnnnnnnnnnnnnnnnnnnnccttangnnnnncttctaatcaggatatccctaagggcgtcccaatttcttaagaccttttaatanccctggttttcntccttcctggttaattccaattaag

SEQ ID NO: 383 - DNA, 497 bp, Homo sapiens
  misc_feature (8)..(442): Each "n" represents a nucleotide selected from a, t, g or c, or contains no nucleotide.
ttgaccangagacaaagaantgnnnnnnnnnnnnnnnnnnnnnnngctactggaccctggtcanccatnggggcattcacgccacagccacacaagtttctgccaanaccatgtttgagatggagtngcgtggccggcgggtagcacntcaaagccnagcaacgggcgctnacgtgtgcatgaagaagaatgggcannnnnnnnnnnnnnnnnnnnnnnnnnnnnnnnnnnnnccgcccggcctggacagggaaggtggcgggaggggcnnnnnnnnnnnnnnnnnnnnnnccaggnnnnnnnnnnnnnnnnnnnnncaagctcatcaaccggcccatcctggtntgcgcngnctggacggcttcgtctgccaccaccgcggctccaaccagctggacaccaaccgcnncntctacgacgtcttccannnnnnnnnnnnnnncggcgcctaccggatccgaggccgcgacggagggttctggtacacgggcagccac

SEQ ID NO: 384 - DNA, 103 bp, Homo sapiens
agtgaattccctcactcgtctcccccaacagctgggaccctgaccagcttccccctccctccccttgcctgtgccagggtgaggtcagcacattttcaacagg

SEQ ID NO: 385 - DNA, 112 bp, Homo sapiens
aattcaaggtgaagctgccagatgggcacgagctgacttttcccaacaggctgggtcacagccacctgagctacctgagcgtaaggggcgggttcaacatgtcctctttcaa

SEQ ID NO: 386 - DNA, 44 bp, Homo sapiens
aggaactttttgaaatagggcaagtttatgtttcatgcgagaaa

SEQ ID NO: 387 - DNA, 25 bp, probe
cattcctgatttttgtctgatgtga

SEQ ID NO: 388 - DNA, 25 bp, probe
aaagtttgcattctactcaggaaaa

SEQ ID NO: 389 - DNA, 25 bp, probe
tttgcattctactcaggaaaaagca

SEQ ID NO: 390 - DNA, 25 bp, probe
ttgcattctactcaggaaaaagcat

SEQ ID NO: 391 - DNA, 25 bp, probe
caggaaaaagcatcttcttgtatat

SEQ ID NO: 392 - DNA, 25 bp, probe
attatcctgtgttctttcctgactg

SEQ ID NO: 393 - DNA, 25 bp, probe
ctttcctgactggtaatattgtgtg

SEQ ID NO: 394 - DNA, 25 bp, probe
gtgtatttttactccttaaagagct

SEQ ID NO: 395 - DNA, 25 bp, probe
ctccttaaagagctagaatacatag

SEQ ID NO: 396 - DNA, 25 bp, probe
aatgaatcaactgaccattacgtag

SEQ ID NO: 397 - DNA, 25 bp, probe
agtagacaatttctgtaatgtcccc

SEQ ID NO: 398 - DNA, 25 bp, probe
tgtaatgtccccttctttctaggct

SEQ ID NO: 399 - DNA, 25 bp, probe
ctaggctctgttgctgtgtgaatcc

SEQ ID NO: 400 - DNA, 25 bp, probe
ggctctgttgctgtgtgaatccatt

SEQ ID NO: 401 - DNA, 25 bp, probe
gaatccattagatttacagtatcgt

SEQ ID NO: 402 - DNA, 25 bp, probe
acttgtgatgccttagaaaaatatc

SEQ ID NO: 403 - DNA, 25 bp, probe
taagcggtcatcgttgcgtcatggg

SEQ ID NO: 404 - DNA, 25 bp, probe
agcggggactgatctactttcacat

SEQ ID NO: 405 - DNA, 25 bp, probe
catctgcattagaggtgcccagtag

SEQ ID NO: 406 - DNA, 25 bp, probe
tcagacacacggacacaatcagccg

SEQ ID NO: 407 - DNA, 25 bp, probe
aatcagccgagaagttcctggtctg

SEQ ID NO: 408 - DNA, 25 bp, probe
ccgagaagttcctggtctgaatcac

SEQ ID NO: 409 - DNA, 25 bp, probe
agttcctggtctgaatcacgagaat

SEQ ID NO: 410 - DNA, 25 bp, probe
aggcataaggctgagctgagaccag

SEQ ID NO: 411 - DNA, 25 bp, probe
ggcataaggctgagctgagaccagt

SEQ ID NO: 412 - DNA, 25 bp, probe
tccttgccagggagtttctgagggt

SEQ ID NO: 413 - DNA, 25 bp, probe
ccagggagtttctgagggtctgctt

SEQ ID NO: 414 - DNA, 25 bp, probe
ctgagggtctgctttgtttaccttt

SEQ ID NO: 415 - DNA, 25 bp, probe
tgagggtctgctttgtttacctttc

SEQ ID NO: 416 - DNA, 25 bp, probe
tctgctttgtttacctttcgtgcgg

SEQ ID NO: 417 - DNA, 25 bp, probe
ttgtttacctttcgtgcggtggatt

SEQ ID NO: 418 - DNA, 25 bp, probe
taactccgtctacctggcgttttgt

SEQ ID NO: 419 - DNA, 25 bp, probe
tgttcggtgatccgggactcactgc

SEQ ID NO: 420 - DNA, 25 bp, probe
gttcggtgatccgggactcactgct

SEQ ID NO: 421 - DNA, 25 bp, probe
ttcggtgatccgggactcactgctg

SEQ ID NO: 422 - DNA, 25 bp, probe
tcggtgatccgggactcactgctgc

SEQ ID NO: 423 - DNA, 25 bp, probe
ccgggactcactgctgcaggatggg

SEQ ID NO: 424 - DNA, 25 bp, probe
cgggactcactgctgcaggatgggg

SEQ ID NO: 425 - DNA, 25 bp, probe
tgctgcaggatggggaatttagcat

SEQ ID NO: 426 - DNA, 25 bp, probe
cgctccccacagctttgcacccctt

SEQ ID NO: 427 - DNA, 25 bp, probe
cacagctttgcacccctttcctccc

SEQ ID NO: 428 - DNA, 25 bp, probe
ctccccatacacacacaaaccattt

SEQ ID NO: 429 - DNA, 25 bp, probe
ccccatacacacacaaaccatttta

SEQ ID NO: 430 - DNA, 25 bp, probe
ccatacacacacaaaccattttatt

SEQ ID NO: 431 - DNA, 25 bp, probe
catacacacacaaaccattttattt

SEQ ID NO: 432 - DNA, 25 bp, probe
tacacacacaaaccattttattttt

SEQ ID NO: 433 - DNA, 25 bp, probe
catatccctcccgtgtgtggttgga

SEQ ID NO: 434 - DNA, 25 bp, probe
atatccctcccgtgtgtggttggaa

SEQ ID NO: 435 - DNA, 25 bp, probe
tacacatcttggagcccttgcccag

SEQ ID NO: 436 - DNA, 25 bp, probe
atcttggagcccttgcccagactgt

SEQ ID NO: 437 - DNA, 25 bp, probe
tcttggagcccttgcccagactgtg

SEQ ID NO: 438 - DNA, 25 bp, probe
gagcccttgcccagactgtgcaggg

SEQ ID NO: 439 - DNA, 25 bp, probe
ctggatggctaccttgcaggctgtc

SEQ ID NO: 440 - DNA, 25 bp, probe
ggatggctaccttgcaggctgtcac

SEQ ID NO: 441 - DNA, 25 bp, probe
cccttgcccagactgtgcaggggag

SEQ ID NO: 442 - DNA, 25 bp, probe
tggctaccttgcaggctgtcaccct

SEQ ID NO: 443 - DNA, 25 bp, probe
accttgcaggctgtcacccttaaca

SEQ ID NO: 444 - DNA, 25 bp, probe
cttgcaggctgtcacccttaacaag

SEQ ID NO: 445 - DNA, 25 bp, probe
gtggccgagttcctggccaggcaca

SEQ ID NO: 446 - DNA, 25 bp, probe
tggccgagttcctggccaggcacag

SEQ ID NO: 447 - DNA, 25 bp, probe
gagttcctggccaggcacagcaacg

SEQ ID NO: 448 - DNA, 25 bp, probe
tcctggccaggcacagcaacgtgaa

SEQ ID NO: 449 - DNA, 25 bp, probe
ctggccaggcacagcaacgtgaatc

SEQ ID NO: 450 - DNA, 25 bp, probe
gcacagcaacgtgaatctcaccatc

SEQ ID NO: 451 - DNA, 25 bp, probe
ttcctttgccattgatttttgagac

SEQ ID NO: 452 - DNA, 25 bp, probe
tcctttgccattgatttttgagact

SEQ ID NO: 453 - DNA, 25 bp, probe
ctttgccattgatttttgagactca

SEQ ID NO: 454 - DNA, 25 bp, probe
ttgccattgatttttgagactcatg

SEQ ID NO: 455 - DNA, 25 bp, probe
ccattgatttttgagactcatgcat

SEQ ID NO: 456 - DNA, 25 bp, probe
tgtatgtaggtctcacagatttcaa

SEQ ID NO: 457 - DNA, 25 bp, probe
gcctggctactggattggtgtccgc

SEQ ID NO: 458 - DNA, 25 bp, probe
ctggctactggattggtgtccgcta

SEQ ID NO: 459 - DNA, 25 bp, probe
tggctactggattggtgtccgctat

SEQ ID NO: 460 - DNA, 25 bp, probe
ggctactggattggtgtccgctatg

SEQ ID NO: 461 - DNA, 25 bp, probe
tactggattggtgtccgctatgatg

SEQ ID NO: 462 - DNA, 25 bp, probe
actggattggtgtccgctatgatga

SEQ ID NO: 463 - DNA, 25 bp, probe
ccaggccaagtatggcgcctttgtc

SEQ ID NO: 464 - DNA, 25 bp, probe
tggcgcctttgtcaagccagcagtc

SEQ ID NO: 465 - DNA, 25 bp, probe
ctttgtcaagccagcagtcgtgacg

SEQ ID NO: 466 - DNA, 25 bp, probe
tgtcaagccagcagtcgtgacggtg

SEQ ID NO: 467 - DNA, 25 bp, probe
ataatatcaaggagtgtcctcttgc

SEQ ID NO: 468 - DNA, 25 bp, probe
taatatcaaggagtgtcctcttgct

SEQ ID NO: 469 - DNA, 25 bp, probe
aatatcaaggagtgtcctcttgctc

SEQ ID NO: 470 - DNA, 25 bp, probe
atatcaaggagtgtcctcttgctcc

SEQ ID NO: 471 - DNA, 25 bp, probe
tatcaaggagtgtcctcttgctcct

SEQ ID NO: 472 - DNA, 25 bp, probe
atcaaggagtgtcctcttgctcctc

SEQ ID NO: 473 - DNA, 25 bp, probe
ggagtgtcctcttgctcctcttcca

SEQ ID NO: 474 - DNA, 25 bp, probe
ataatctgaaggactgtctctttgt

SEQ ID NO: 475 - DNA, 25 bp, probe
taatctgaaggactgtctctttgtc

SEQ ID NO: 476 - DNA, 25 bp, probe
aatctgaaggactgtctctttgtcc

SEQ ID NO: 477 - DNA, 25 bp, probe
atctgaaggactgtctctttgtccc

SEQ ID NO: 478 - DNA, 25 bp, probe
tctgaaggactgtctctttgtccct

SEQ ID NO: 479 - DNA, 25 bp, probe
tgaaggactgtctctttgtccctct

SEQ ID NO: 480 - DNA, 25 bp, probe
gaaggactgtctctttgtccctctt

SEQ ID NO: 481 - DNA, 25 bp, probe
aggactgtctctttgtccctcttcc

SEQ ID NO: 482 - DNA, 25 bp, probe
ggactgtctctttgtccctcttcca

SEQ ID NO: 483 - DNA, 25 bp, probe
ggttctacaagctgcacgagcggag

SEQ ID NO: 484 - DNA, 25 bp, probe
ggtgtgagcccattgccatgacagt

SEQ ID NO: 485 - DNA, 25 bp, probe
tgttccaggaggacctgtacccacc

SEQ ID NO: 486 - DNA, 25 bp, probe
ctcatctccctcaaggatggctacg

SEQ ID NO: 487 - DNA, 25 bp, probe
catctccctcaaggatggctacgta

SEQ ID NO: 488 - DNA, 25 bp, probe
atctccctcaaggatggctacgtac

SEQ ID NO: 489 - DNA, 25 bp, probe
ctcaaggatggctacgtacccccaa

SEQ ID NO: 490 - DNA, 25 bp, probe
aggatggctacgtacccccaaagag

SEQ ID NO: 491 - DNA, 25 bp, probe
ggatggctacgtacccccaaagagc

SEQ ID NO: 492 - DNA, 25 bp, probe
gtacccccaaagagccgggagctga

SEQ ID NO: 493 - DNA, 25 bp, probe
gaggccagtggcactcccagctcgg

SEQ ID NO: 494 - DNA, 25 bp, probe
cacggtgcaggagctccagaagcgc

SEQ ID NO: 495 - DNA, 25 bp, probe
acggtgcaggagctccagaagcgct

SEQ ID NO: 496 - DNA, 25 bp, probe
ctccagaagcgcttggacaggctgg

SEQ ID NO: 497 - DNA, 25 bp, probe
aggagacagtccaggccaagtagag

SEQ ID NO: 498 - DNA, 25 bp, probe
gcagggcctccagcagggtcagcca

SEQ ID NO: 499 - DNA, 25 bp, probe
tgcctggcttcgccccacctggttt

SEQ ID NO: 500 - DNA, 25 bp, probe
gctcttccttacctgctcgcctttt

SEQ ID NO: 501 - DNA, 25 bp, probe
tccttacctgctcgccttttaccct

SEQ ID NO: 502 - DNA, 25 bp, probe
actcacccctagatttttgttgcat

SEQ ID NO: 503 - DNA, 25 bp, probe
tagatttttgttgcatagccagtaa

SEQ ID NO: 504 - DNA, 25 bp, probe
aaaactggaaggactgtgttatggg

SEQ ID NO: 505 - DNA, 25 bp, probe
actgtgttatgggagtggagtataa

SEQ ID NO: 506 - DNA, 25 bp, probe
agtataactggtaactggttaatgc

SEQ ID NO: 507 - DNA, 25 bp, probe
ataactggtaactggttaatgcttt

SEQ ID NO: 508 - DNA, 25 bp, probe
ctggttaatgctttcccctttccat

SEQ ID NO: 509 - DNA, 25 bp, probe
tggttaatgctttcccctttccatt

SEQ ID NO: 510 - DNA, 25 bp, probe
taatgctttcccctttccattattc

SEQ ID NO: 511 - DNA, 25 bp, probe
aggcacttgggagtcccaaccctgt

SEQ ID NO: 512 - DNA, 25 bp, probe
gcacttgggagtcccaaccctgtaa

SEQ ID NO: 513 - DNA, 25 bp, probe
aaagatgtaccactgtgctcactct

SEQ ID NO: 514 - DNA, 25 bp, probe
atgtaccactgtgctcactctttac

SEQ ID NO: 515 - DNA, 25 bp, probe
ggaggaaccagtagtcctggcattg

SEQ ID NO: 516 - DNA, 25 bp, probe
atctccagctcagatcttgctcagg

SEQ ID NO: 517 - DNA, 25 bp, probe
ctccagctcagatcttgctcaggtg

SEQ ID NO: 518 - DNA, 25 bp, probe
gatcttgctcaggtggcaggtccag

SEQ ID NO: 519 - DNA, 25 bp, probe
tctcgaatccttcagaacatcaagg

SEQ ID NO: 520 - DNA, 25 bp, probe
gaagcagctaaatgccctgaacaaa

SEQ ID NO: 521 - DNA, 25 bp, probe
atatattgtgcctatgcttacggtg

SEQ ID NO: 522 - DNA, 25 bp, probe
tatattgtgcctatgcttacggtgg

SEQ ID NO: 523 - DNA, 25 bp, probe
tattgtgcctatgcttacggtggat

SEQ ID NO: 524 - DNA, 25 bp, probe
tactgagaccacagcttcttggcct

SEQ ID NO: 525 - DNA, 25 bp, probe
tctgcagctaatgaggtcctgccac

SEQ ID NO: 526 - DNA, 25 bp, probe
gcagctaatgaggtcctgccacaac

SEQ ID NO: 527 - DNA, 25 bp, probe
tgatgacatactcagtgtggcctcc

SEQ ID NO: 528 - DNA, 25 bp, probe
cttggctcaaaatgagctaattgcc

SEQ ID NO: 529 - DNA, 25 bp, probe
tgatgagcctgtcctgctggaggaa

SEQ ID NO: 530 - DNA, 25 bp, probe
gatgagcctgtcctgctggaggaac

SEQ ID NO: 531 - DNA, 25 bp, probe
tttatttcagaggaccagtgctttg

SEQ ID NO: 532 - DNA, 25 bp, probe
ttatttcagaggaccagtgctttga

SEQ ID NO: 533 - DNA, 25 bp, probe
tttaaatgccctttctgcagttgga

SEQ ID NO: 534 - DNA, 25 bp, probe
ttaaatgccctttctgcagttggaa

SEQ ID NO: 535 - DNA, 25 bp, probe
taaatgccctttctgcagttggaag

SEQ ID NO: 536 - DNA, 25 bp, probe
gccctttctgcagttggaaggtttt

SEQ ID NO: 537 - DNA, 25 bp, probe
gttaaaatcacaaggaattgcccaa

SEQ ID NO: 538 - DNA, 25 bp, probe
atcacaaggaattgcccaatctaag

SEQ ID NO: 539 - DNA, 25 bp, probe
aaggaattgcccaatctaagcagac

SEQ ID NO: 540 - DNA, 25 bp, probe
aggaattgcccaatctaagcagact

SEQ ID NO: 541 - DNA, 25 bp, probe
ttgcccaatctaagcagactttgcc

SEQ ID NO: 542 - DNA, 25 bp, probe
tgcccaatctaagcagactttgcct

SEQ ID NO: 543 - DNA, 25 bp, probe
gcccaatctaagcagactttgcctt

SEQ ID NO: 544 - DNA, 25 bp, probe
gcagactttgccttttttcaaaggt

SEQ ID NO: 545 - DNA, 25 bp, probe
cagactttgccttttttcaaaggtg

SEQ ID NO: 546 - DNA, 25 bp, probe
ctttttgacacaagcctactgaatg

SEQ ID NO: 547 - DNA, 25 bp, probe
agcaagacccactctgttccagaag

SEQ ID NO: 548 - DNA, 25 bp, probe
cactctgttccagaagccctataag

SEQ ID NO: 549 - DNA, 25 bp, probe
ggaaatgtggctctctccatcttgc

SEQ ID NO: 550 - DNA, 25 bp, probe
gaaatgtggctctctccatcttgca

SEQ ID NO: 551 - DNA, 25 bp, probe
atgtggctctctccatcttgcatac

SEQ ID NO: 552 - DNA, 25 bp, probe
tgtggctctctccatcttgcataca

SEQ ID NO: 553 - DNA, 25 bp, probe
ggctctctccatcttgcatacaggg

SEQ ID NO: 554 - DNA, 25 bp, probe
ccatcttgcatacagggctcccaat

SEQ ID NO: 555 - DNA, 25 bp, probe
acagggctcccaatagaaatgaaca

SEQ ID NO: 556 - DNA, 25 bp, probe
cagggctcccaatagaaatgaacac

SEQ ID NO: 557 - DNA, 25 bp, probe
gggctcccaatagaaatgaacacag

SEQ ID NO: 558 - DNA, 25 bp, probe
gctcccaatagaaatgaacacagag

SEQ ID NO: 559 - DNA, 25 bp, probe
acacagagatattgcctgtgtgttt

SEQ ID NO: 560 - DNA, 25 bp, probe
atggctctcaccatttcctaagaga

SEQ ID NO: 561 - DNA, 25 bp, probe
ggctctcaccatttcctaagagata

SEQ ID NO: 562 - DNA, 25 bp, probe
actgattctagcagaataaaacatg

SEQ ID NO: 563 - DNA, 25 bp, probe
aaatcaagtgtgtttattgaatggt

SEQ ID NO: 564 - DNA, 25 bp, probe
tgtttattgaatggtgattgcctgc

SEQ ID NO: 565 - DNA, 25 bp, probe
ttattgaatggtgattgcctgcttt

SEQ ID NO: 566 - DNA, 25 bp, probe
tattgaatggtgattgcctgcttta

SEQ ID NO: 567 - DNA, 25 bp, probe
aatggtgattgcctgctttatttca

SEQ ID NO: 568 - DNA, 25 bp, probe
atgttataactgaacccaaataaat

SEQ ID NO: 569 - DNA, 25 bp, probe
taactgaacccaaataaatacaagt

SEQ ID NO: 570 - DNA, 25 bp, probe
ctgaacccaaataaatacaagttca

SEQ ID NO: 571 - DNA, 25 bp, probe
tgaacccaaataaatacaagttcaa

SEQ ID NO: 572 - DNA, 25 bp, probe
caaataaatacaagttcaaatttat

SEQ ID NO: 573 - DNA, 25 bp, probe
ataaatacaagttcaaatttatgta

SEQ ID NO: 574 - DNA, 25 bp, probe
aatacaagttcaaatttatgtagac

SEQ ID NO: 575 - DNA, 25 bp, probe
tttatgtagactgtataagattata

SEQ ID NO: 576 - DNA, 25 bp, probe
attataataaaacatgtctgaagtc

SEQ ID NO: 577 - DNA, 25 bp, probe
ttataataaaacatgtctgaagtca

SEQ ID NO: 578 - DNA, 25 bp, probe
taataaaacatgtctgaagtcaaaa

SEQ ID NO: 579 - DNA, 25 bp, probe
catcgccagcatctttgcctggaca

SEQ ID NO: 580 - DNA, 25 bp, probe
gatgggaaccaagacctcatcaggt

SEQ ID NO: 581 - DNA, 25 bp, probe
agagtggagccatgaccaaggacct

SEQ ID NO: 582 - DNA, 25 bp, probe
gcctcagcaatgtgaagctgaacga

SEQ ID NO: 583 - DNA, 25 bp, probe
cctcagcaatgtgaagctgaacgag

SEQ ID NO: 584 - DNA, 25 bp, probe
ccatcaagagcaacctggacagagc

SEQ ID NO: 585 - DNA, 25 bp, probe
tcaagagcaacctggacagagccct

SEQ ID NO: 586 - DNA, 25 bp, probe
caacctggacagagccctgggcagg

SEQ ID NO: 587 - DNA, 25 bp, probe
tctctggaggcctttctaggggatg

SEQ ID NO: 588 - DNA, 25 bp, probe
ctggaggcctttctaggggatgttt

SEQ ID NO: 589 - DNA, 25 bp, probe
aagcatatgtgtgtttcccctcatg

SEQ ID NO: 590 - DNA, 25 bp, probe
agcatatgtgtgtttcccctcatgg

SEQ ID NO: 591 - DNA, 25 bp, probe
tttcccctcatggtgacgtgaggca

SEQ ID NO: 592 - DNA, 25 bp, probe
agtgcgttttacctcagccagtcag

SEQ ID NO: 593 - DNA, 25 bp, probe
cagtcagtatgttttgcatactgta

SEQ ID NO: 594 - DNA, 25 bp, probe
tggtgccatatttagctactaaaaa

SEQ ID NO: 595 - DNA, 25 bp, probe
tacccaccaaacagaacgaggaatt

SEQ ID NO: 596 - DNA, 25 bp, probe
caccaaacagaacgaggaattccgc

SEQ ID NO: 597 - DNA, 25 bp, probe
taaattttggcatgcggctaccaag

SEQ ID NO: 598 - DNA, 25 bp, probe
ttggcatgcggctaccaagggcatc

SEQ ID NO: 599 - DNA, 25 bp, probe
tggcatgcggctaccaagggcatcc

SEQ ID NO: 600 - DNA, 25 bp, probe
gcatgcggctaccaagggcatcctt

SEQ ID NO: 601 - DNA, 25 bp, probe
atgcggctaccaagggcatccttgt

SEQ ID NO: 602 - DNA, 25 bp, probe
gctaccaagggcatccttgtggcta

SEQ ID NO: 603 - DNA, 25 bp, probe
caacgtcccggtgttctggccgatt

SEQ ID NO: 604 - DNA, 25 bp, probe
acgtcccggtgttctggccgattct

SEQ ID NO: 605 - DNA, 25 bp, probe
gtcccggtgttctggccgattctgg

SEQ ID NO: 606 - DNA, 25 bp, probe
gtgttctggccgattctggtgatgt

SEQ ID NO: 607 - DNA, 25 bp, probe
ctggccgattctggtgatgtacttc

SEQ ID NO: 608 - DNA, 25 bp, probe
ggccgattctggtgatgtacttcat

SEQ ID NO: 609 - DNA, 25 bp, probe
gccgattctggtgatgtacttcatc

SEQ ID NO: 610 - DNA, 25 bp, probe
ccgattctggtgatgtacttcatca

SEQ ID NO: 611 - DNA, 25 bp, probe
cccgggacgataacctggcagtgga

SEQ ID NO: 612 - DNA, 25 bp, probe
ccgggacgataacctggcagtggaa

SEQ ID NO: 613 - DNA, 25 bp, probe
cgataacctggcagtggaaggaaag

SEQ ID NO: 614 - DNA, 25 bp, probe
aacctggcagtggaaggaaagaagc

SEQ ID NO: 615 - DNA, 25 bp, probe
acctggcagtggaaggaaagaagca

SEQ ID NO: 616 - DNA, 25 bp, probe
gaagcatggtctactttaggtgtgc

SEQ ID NO: 617 - DNA, 25 bp, probe
catggtctactttaggtgtgcgctg

SEQ ID NO: 618 - DNA, 25 bp, probe
atggtctactttaggtgtgcgctgg

SEQ ID NO: 619 - DNA, 25 bp, probe
gtctactttaggtgtgcgctgggtc

SEQ ID NO: 620 - DNA, 25 bp, probe
ctactttaggtgtgcgctgggtctc

SEQ ID NO: 621 - DNA, 25 bp, probe
gcgctgggtctctggtgctcttcac

SEQ ID NO: 622 - DNA, 25 bp, probe
cgctgggtctctggtgctcttcact

SEQ ID NO: 623 - DNA, 25 bp, probe
gggtctctggtgctcttcactgttg

SEQ ID NO: 624 - DNA, 25 bp, probe
ctctggtgctcttcactgttgcctg

SEQ ID NO: 625 - DNA, 25 bp, probe
tctggtgctcttcactgttgcctgt

SEQ ID NO: 626 - DNA, 25 bp, probe
ggtgctcttcactgttgcctgtcac

SEQ ID NO: 627 - DNA, 25 bp, probe
cttcgagggtcaggttggacaagct

SEQ ID NO: 628 - DNA, 25 bp, probe
ggtcaggttggacaagctgcatact

SEQ ID NO: 629 - DNA, 25 bp, probe
gttggacaagctgcatactctgctt

SEQ ID NO: 630 - DNA, 25 bp, probe
tggacaagctgcatactctgcttcc

SEQ ID NO: 631 - DNA, 25 bp, probe
caagctgcatactctgcttccaagg

SEQ ID NO: 632 - DNA, 25 bp, probe
gctgcatactctgcttccaaggggg

SEQ ID NO: 633 - DNA, 25 bp, probe
gtgggcatgacactgcccattgctc

SEQ ID NO: 634 - DNA, 25 bp, probe
ttgctcgggatctggctcccatagg

SEQ ID NO: 635 - DNA, 25 bp, probe
cccattcctcaatggagaggtcatc

SEQ ID NO: 636 - DNA, 25 bp, probe
attcctcaatggagaggtcatccgg

SEQ ID NO: 637 - DNA, 25 bp, probe
ttcctcaatggagaggtcatccggc

SEQ ID NO: 638 - DNA, 25 bp, probe
gatggggccattcgtatgcagcctt

SEQ ID NO: 639 - DNA, 25 bp, probe
ggggccattcgtatgcagccttgaa

SEQ ID NO: 640 - DNA, 25 bp, probe
tatgcagccttgaagggagaaggca

SEQ ID NO: 641 - DNA, 25 bp, probe
gcagagaaaacacacgctcctctgc

SEQ ID NO: 642 - DNA, 25 bp, probe
ccagtcgccctctgtgcctaataaa

SEQ ID NO: 643 - DNA, 25 bp, probe
atgcatgtgagaggagatggaccct

SEQ ID NO: 644 - DNA, 25 bp, probe
accctggtattactatgagacaatt

SEQ ID NO: 645 - DNA, 25 bp, probe
ggaacttattgatcattctccgaaa

SEQ ID NO: 646 - DNA, 25 bp, probe
gatcattctccgaaagcaactcctg

SEQ ID NO: 647 - DNA, 25 bp, probe
gaaagcaactcctgacaattaagca

SEQ ID NO: 648 - DNA, 25 bp, probe
attctgtatttttgctctccgtgaa

SEQ ID NO: 649 - DNA, 25 bp, probe
gtatttttgctctccgtgaaaaaca

SEQ ID NO: 650 - DNA, 25 bp, probe
aagagcctctgacattactgtctct

SEQ ID NO: 651 - DNA, 25 bp, probe
ctcagtgttggttcagattgaggct

SEQ ID NO: 652 - DNA, 25 bp, probe
tgtttgaggagtttggcttccagtc

SEQ ID NO: 653 - DNA, 25 bp, probe
tttggcttccagtccccaaagaagg

SEQ ID NO: 654 - DNA, 25 bp, probe
atttgtgaactcctaaaattgtagc

SEQ ID NO: 655 - DNA, 25 bp, probe
gtgaactcctaaaattgtagcaact

SEQ ID NO: 656 - DNA, 25 bp, probe
gtattttgtacaaatgcctgtactg

SEQ ID NO: 657 - DNA, 25 bp, probe
gtctgtattattgaggggcaactca

SEQ ID NO: 658 - DNA, 25 bp, probe
gggcaactcaggattttaagttcca

SEQ ID NO: 659 - DNA, 25 bp, probe
atcgcaggcctagactcccgaggct

SEQ ID NO: 660 - DNA, 25 bp, probe
tcgcaggcctagactcccgaggctt

SEQ ID NO: 661 - DNA, 25 bp, probe
ctccctggcccaggagcttggactg

SEQ ID NO: 662 - DNA, 25 bp, probe
cttggactgggctgcgtgctcatcc

SEQ ID NO: 663 - DNA, 25 bp, probe
tgggctgcgtgctcatccgaaagcg

SEQ ID NO: 664 - DNA, 25 bp, probe
tcctattccctggagtacgggaagg

SEQ ID NO: 665 - DNA, 25 bp, probe
aagacgccctggagccaggacagag

SEQ ID NO: 666 - DNA, 25 bp, probe
tcgtcgtggatgatctgctggccac

SEQ ID NO: 667 - DNA, 25 bp, probe
tgagcctggtggagctgacctcgct

SEQ ID NO: 668 - DNA, 25 bp, probe
gcctggtggagctgacctcgcttaa

SEQ ID NO: 669 - DNA, 25 bp, probe
ttcttctctctcctgcagtatgagt

SEQ ID NO: 670 - DNA, 25 bp, probe
tcttctctctcctgcagtatgagtg

SEQ ID NO: 671 - DNA, 25 bp, probe
accggctgcccacagggaacacatt

SEQ ID NO: 672 - DNA, 25 bp, probe
ctttgctggggttcagcgcctctcc

SEQ ID NO: 673 - DNA, 25 bp, probe
ctggaagtgccaaagcctggggcaa

SEQ ID NO: 674 - DNA, 25 bp, probe
tggaagtgccaaagcctggggcaaa

SEQ ID NO: 675 - DNA, 25 bp, probe
tcagctcttgcaagaggactccctc

SEQ ID NO: 676 - DNA, 25 bp, probe
agaggactccctcaatgtggctgac

SEQ ID NO: 677 - DNA, 25 bp, probe
agtctggactctcaaagagaaatgc

SEQ ID NO: 678 - DNA, 25 bp, probe
cattctggtgattacatggatccaa

SEQ ID NO: 679 - DNA, 25 bp, probe
gatccaacacctgatccccaagatt

SEQ ID NO: 680 - DNA, 25 bp, probe
agcaatccaggagaaggtgctggag

SEQ ID NO: 681 - DNA, 25 bp, probe
gtacttctcagaacgtggggatgct

SEQ ID NO: 682 - DNA, 25 bp, probe
caaggcctccaaggagactcatgta

SEQ ID NO: 683 - DNA, 25 bp, probe
ttaccgggccttggtgcatgagcga

SEQ ID NO: 684 - DNA, 25 bp, probe
agatgaggcagcctatggggagctc

SEQ ID NO: 685 - DNA, 25 bp, probe
catggtgctggacctgagggccttc

SEQ ID NO: 686 - DNA, 25 bp, probe
cctgagggccttctatgctgagctt

SEQ ID NO: 687 - DNA, 25 bp, probe
ggccttctatgctgagctttatcat

SEQ ID NO: 688 - DNA, 25 bp, probe
tgagctttatcatatcatcagcagc

SEQ ID NO: 689 - DNA, 25 bp, probe
ttatcatatcatcagcagcaacctg

SEQ ID NO: 690 - DNA, 25 bp, probe
tatcatcagcagcaacctggagaaa

SEQ ID NO: 691 - DNA, 25 bp, probe
gatccgtgccagaagcaagcctgtg

SEQ ID NO: 692 - DNA, 25 bp, probe
tgtttacaagccaacagctacatgg

SEQ ID NO: 693 - DNA, 25 bp, probe
gtttacaagccaacagctacatgga

SEQ ID NO: 694 - DNA, 25 bp, probe
caagccaacagctacatggaatcaa

SEQ ID NO: 695 - DNA, 25 bp, probe
gaatcaaagtgtcaggctgtcatcc

SEQ ID NO: 696 - DNA, 25 bp, probe
caggctgtcatccaagaactgcgta

SEQ ID NO: 697 - DNA, 25 bp, probe
ctgcgtaagtgttgtgctcagtatc

SEQ ID NO: 698 - DNA, 25 bp, probe
ggaagatctgtcgtctgttcaggat

SEQ ID NO: 699 - DNA, 25 bp, probe
ctgtcgtctgttcaggatttgaaaa

SEQ ID NO: 700 - DNA, 25 bp, probe
gaagaaaacctaacacggaagtctg

SEQ ID NO: 701 - DNA, 25 bp, probe
gaagtgctgctccatgtttccacca

SEQ ID NO: 702 - DNA, 25 bp, probe
gctgctccatgtttccaccaaatga

SEQ ID NO: 703 - DNA, 25 bp, probe
ttatcctcctgactcttcaggccag

SEQ ID NO: 704 - DNA, 25 bp, probe
aggccaggtagcagcaaatagcaaa

SEQ ID NO: 705 - DNA, 25 bp, probe
aatgaatatgccatctatgcagaac

SEQ ID NO: 706 - DNA, 25 bp, probe
atatgccatctatgcagaacaggca

SEQ ID NO: 707 - DNA, 25 bp, probe
ggacaccattagaaactatccagaa

SEQ ID NO: 708 - DNA, 25 bp, probe
gacaccattagaaactatccagaag

SEQ ID NO: 709 - DNA, 25 bp, probe
gctaagggatccatggggccgcaat

SEQ ID NO: 710 - DNA, 25 bp, probe
caaagagtgtttccttttctgatgt

SEQ ID NO: 711 - DNA, 25 bp, probe
ccttttctgatgtattctttaaagg

SEQ ID NO: 712 - DNA, 25 bp, probe
atattacctggagtccctgaataaa

SEQ ID NO: 713 - DNA, 25 bp, probe
tcactgaagataatacctggaagca

SEQ ID NO: 714 - DNA, 25 bp, probe
atacctggaagcatcatagtggttt

SEQ ID NO: 715 - DNA, 25 bp, probe
agatttcttctctgtagcctacttg

SEQ ID NO: 716 - DNA, 25 bp, probe
tgtagcctacttgtctggtttatcc

SEQ ID NO: 717 - DNA, 25 bp, probe
acttgtctggtttatcccttacaga

SEQ ID NO: 718 - DNA, 25 bp, probe
tggtttatcccttacagaatattag

SEQ ID NO: 719 - DNA, 25 bp, probe
ggtttatcccttacagaatattagt

SEQ ID NO: 720 - DNA, 25 bp, probe
aaagctcttaatacggccgacgcta

SEQ ID NO: 721 - DNA, 25 bp, probe
ttaatacggccgacgctatcccttg

SEQ ID NO: 722 - DNA, 25 bp, probe
gtgctgcaaggtgtggtttcccaca

SEQ ID NO: 723 - DNA, 25 bp, probe
tagcaatccaggagaaggtgctgga

SEQ ID NO: 724 - DNA, 25 bp, probe
gaatgccgtcaagaccaaagtggaa

SEQ ID NO: 725 - DNA, 25 bp, probe
agtggaagctttccagacaaccatt

SEQ ID NO: 726 - DNA, 25 bp, probe
gtacttctcagaacgtggggatgct

SEQ ID NO: 727 - DNA, 25 bp, probe
caaggcctccaaggagactcatgta

SEQ ID NO: 728 - DNA, 25 bp, probe
ctccaaggagactcatgtaatggat

SEQ ID NO: 729 - DNA, 25 bp, probe
ttaccgggccttggtgcatgagcga

SEQ ID NO: 730 - DNA, 25 bp, probe
cagcctatggggagctcagggccat

SEQ ID NO: 731 - DNA, 25 bp, probe
cctgagggccttctatgctgagctt

SEQ ID NO: 732 - DNA, 25 bp, probe
ggccttctatgctgagctttatcat

SEQ ID NO: 733 - DNA, 25 bp, probe
tgagctttatcatatcatcagcagc

SEQ ID NO: 734 - DNA, 25 bp, probe
catcagcagcaacctggagaaaatt

SEQ ID NO: 735 - DNA, 25 bp, probe
aaagccatctatgtactgaacccgg

SEQ ID NO: 736 - DNA, 25 bp, probe
atctatgtactgaacccgggactag

SEQ ID NO: 737 - DNA, 25 bp, probe
tctatgtactgaacccgggactaga

SEQ ID NO: 738 - DNA, 25 bp, probe
attcaggccctttctcatccagtag

SEQ ID NO: 739 - DNA, 25 bp, probe
tttctgttgctattgatgcaggtca

SEQ ID NO: 740 - DNA, 25 bp, probe
ttgatgcaggtcatgagtccttcct

SEQ ID NO: 741 - DNA, 25 bp, probe
caggtcatgagtccttcctgttcta

SEQ ID NO: 742 - DNA, 25 bp, probe
catgagtccttcctgttctataaag

SEQ ID NO: 743 - DNA, 25 bp, probe
atgagtccttcctgttctataaaga

SEQ ID NO: 744 - DNA, 25 bp, probe
agtccttcctgttctataaagaagg

SEQ ID NO: 745 - DNA, 25 bp, probe
tttgagccagactgtagcagtgaag

SEQ ID NO: 746 - DNA, 25 bp, probe
ccagactgtagcagtgaagacatgg

SEQ ID NO: 747 - DNA, 25 bp, probe
ccaaagaccggagaaaccattgtgg

SEQ ID NO: 748 - DNA, 25 bp, probe
accggagaaaccattgtggaattgc

SEQ ID NO: 749 - DNA, 25 bp, probe
gaaaccattgtggaattgcctcagc

SEQ ID NO: 750 - DNA, 25 bp, probe
atggcgcatgcatgggaggaattca

SEQ ID NO: 751 - DNA, 25 bp, probe
gaggaattcatcttcagtctaccag

SEQ ID NO: 752 - DNA, 25 bp, probe
ggaattcatcttcagtctaccagcc

SEQ ID NO: 753 - DNA, 25 bp, probe
ccgctgtgtcggatacacactcgaa

SEQ ID NO: 754 - DNA, 25 bp, probe
cgctgtgtcggatacacactcgaat

SEQ ID NO: 755 - DNA, 25 bp, probe
agatgatgatcagacccaagcactt

SEQ ID NO: 756 - DNA, 25 bp, probe
gatgatgatcagacccaagcacttt

SEQ ID NO: 757 - DNA, 25 bp, probe
atgatcagacccaagcactttaagc

SEQ ID NO: 758 - DNA, 25 bp, probe
tgatcagacccaagcactttaagcc

SEQ ID NO: 759 - DNA, 25 bp, probe
gatcagacccaagcactttaagcca

SEQ ID NO: 760 - DNA, 25 bp, probe
aaatgatgtctgacggctaggttct

SEQ ID NO: 761 - DNA, 25 bp, probe
atgtctgacggctaggttcttatgc

SEQ ID NO: 762 - DNA, 25 bp, probe
tgtctgacggctaggttcttatgct

SEQ ID NO: 763 - DNA, 25 bp, probe
tgacggctaggttcttatgctacac

SEQ ID NO: 764 - DNA, 25 bp, probe
acggctaggttcttatgctacacag

SEQ ID NO: 765 - DNA, 25 bp, probe
gctaggttcttatgctacacagcat

SEQ ID NO: 766 - DNA, 25 bp, probe
taggttcttatgctacacagcattt

SEQ ID NO: 767 - DNA, 25 bp, probe
ggttcttatgctacacagcatttga

SEQ ID NO: 768 - DNA, 25 bp, probe
gttcttatgctacacagcatttgaa

SEQ ID NO: 769 - DNA, 25 bp, probe
atgctacacagcatttgaaataaag

SEQ ID NO: 770 - DNA, 25 bp, probe
tgctacacagcatttgaaataaagc

SEQ ID NO: 771 - DNA, 25 bp, probe
tctgcagtgtcatacaggagggttg

SEQ ID NO: 772 - DNA, 25 bp, probe
aacacatactcttctgggctcaggg

SEQ ID NO: 773 - DNA, 25 bp, probe
cacatactcttctgggctcagggac

SEQ ID NO: 774 - DNA, 25 bp, probe
tccccagcagaagctgggtgtccac

SEQ ID NO: 775 - DNA, 25 bp, probe
ccccagcagaagctgggtgtccact

SEQ ID NO: 776 - DNA, 25 bp, probe
cccagcagaagctgggtgtccactg

SEQ ID NO: 777 - DNA, 25 bp, probe
tgtccactgcgaggaagcaggtgaa

SEQ ID NO: 778 - DNA, 25 bp, probe
tccactgcgaggaagcaggtgaaga

SEQ ID NO: 779 - DNA, 25 bp, probe
agagaggcatccttttccctaggct

SEQ ID NO: 780 - DNA, 25 bp, probe
gagaggcatccttttccctaggctg

SEQ ID NO: 781 - DNA, 25 bp, probe
cgcccatgcatgaggtgacgggttt

SEQ ID NO: 782 - DNA, 25 bp, probe
gaggcatccttttccctaggctgtg

SEQ ID NO: 783 - DNA, 25 bp, probe
catccttttccctaggctgtgcctg

SEQ ID NO: 784 - DNA, 25 bp, probe
atccttttccctaggctgtgcctgg

SEQ ID NO: 785 - DNA, 25 bp, probe
ttttccctaggctgtgcctggggga

SEQ ID NO: 786 - DNA, 25 bp, probe
tttccctaggctgtgcctgggggac

SEQ ID NO: 787 - DNA, 25 bp, probe
tgatgtgttgttgccatggtaatcc

SEQ ID NO: 788 - DNA, 25 bp, probe
atgtgttgttgccatggtaatcctg

SEQ ID NO: 789 - DNA, 25 bp, probe
tgtgttgttgccatggtaatcctgc

SEQ ID NO: 790 - DNA, 25 bp, probe
ttgttgccatggtaatcctgctcag

SEQ ID NO: 791 - DNA, 25 bp, probe
tgttgccatggtaatcctgctcagt

SEQ ID NO: 792 - DNA, 25 bp, probe
ttgccatggtaatcctgctcagtac

SEQ ID NO: 793 - DNA, 25 bp, probe
tgccatggtaatcctgctcagtacg

SEQ ID NO: 794 - DNA, 25 bp, probe
gccatggtaatcctgctcagtacga

SEQ ID NO: 795 - DNA, 25 bp, probe
ccatggtaatcctgctcagtacgag

SEQ ID NO: 796 - DNA, 25 bp, probe
atggtaatcctgctcagtacgagag

SEQ ID NO: 797 - DNA, 25 bp, probe
tggtaatcctgctcagtacgagagg

SEQ ID NO: 798 - DNA, 25 bp, probe
ggtaatcctgctcagtacgagagga

SEQ ID NO: 799 - DNA, 25 bp, probe
tcctgctcagtacgagaggaaccgc

SEQ ID NO: 800 - DNA, 25 bp, probe
acatttggtgtatgtgcttggctga

SEQ ID NO: 801 - DNA, 25 bp, probe
tagttttaccctactgatgatgtgt

SEQ ID NO: 802 - DNA, 25 bp, probe
ttttaccctactgatgatgtgttgt

SEQ ID NO: 803 - DNA, 25 bp, probe
tttaccctactgatgatgtgttgtt

SEQ ID NO: 804 - DNA, 25 bp, probe
ttaccctactgatgatgtgttgttg

SEQ ID NO: 805 - DNA, 25 bp, probe
accctactgatgatgtgttgttgcc

SEQ ID NO: 806 - DNA, 25 bp, probe
ccctactgatgatgtgttgttgcca

SEQ ID NO: 807 - DNA, 25 bp, probe
gaagaaggggccatcacaggatgcc

SEQ ID NO: 808 - DNA, 25 bp, probe
agaaggggccatcacaggatgccac

SEQ ID NO: 809 - DNA, 25 bp, probe
gaaggggccatcacaggatgccacc

SEQ ID NO: 810 - DNA, 25 bp, probe
aaggggccatcacaggatgccaccc

SEQ ID NO: 811 - DNA, 25 bp, probe
tagaggctccccagggctcccttat

SEQ ID NO: 812 - DNA, 25 bp, probe
cacagccgcctttgggttccatctt

SEQ ID NO: 813 - DNA, 25 bp, probe
gccgcctttgggttccatcttgcta

SEQ ID NO: 814 - DNA, 25 bp, probe
ccgcctttgggttccatcttgctaa

SEQ ID NO: 815 - DNA, 25 bp, probe
cgcctttgggttccatcttgctaat

SEQ ID NO: 816 - DNA, 25 bp, probe
tttgggttccatcttgctaataaac

SEQ ID NO: 817 - DNA, 25 bp, probe
ttgggttccatcttgctaataaaca

SEQ ID NO: 818 - DNA, 25 bp, probe
ggttccatcttgctaataaacactg

SEQ ID NO: 819 - DNA, 25 bp, probe
gttccatcttgctaataaacactgg

SEQ ID NO: 820 - DNA, 25 bp, probe
atcttgctaataaacactggctctg

SEQ ID NO: 821 - DNA, 25 bp, probe
gctaataaacactggctctgggact

SEQ ID NO: 822 - DNA, 25 bp, probe
taaacactggctctgggactagaaa

SEQ ID NO: 823 - DNA, 25 bp, probe
gagaaaaccaggtcttaagcgtgag

SEQ ID NO: 824 - DNA, 25 bp, probe
tcttaagcgtgagaatcgcggacaa

SEQ ID NO: 825 - DNA, 25 bp, probe
agaatcgcggacaagaagtactacc

SEQ ID NO: 826 - DNA, 25 bp, probe
cagcgctctgctgcagtgagatccc

SEQ ID NO: 827 - DNA, 25 bp, probe
gagatcccaggaagctggcacatct

SEQ ID NO: 828 - DNA, 25 bp, probe
agctggcacatcttggaaggtccgt

SEQ ID NO: 829 - DNA, 25 bp, probe
ttggaaggtccgtcctgctcggctt

SEQ ID NO: 830 - DNA, 25 bp, probe
tcctgctcggcttttcgcttgaaca

SEQ ID NO: 831 - DNA, 25 bp, probe
tcggcttttcgcttgaacattccct

SEQ ID NO: 832 - DNA, 25 bp, probe
ttgatctcatcagttctgagcgggt

SEQ ID NO: 833 - DNA, 25 bp, probe
ttctgagcgggtcatggggcaacac

SEQ ID NO: 834 - DNA, 25 bp, probe
gacacagtcgggttgacccagggct

SEQ ID NO: 835 - DNA, 25 bp, probe
tcgggttgacccagggctgtctccc

SEQ ID NO: 836 - DNA, 25 bp, probe
gcatgtgctgcctgttgttatgggt

SEQ ID NO: 837 - DNA, 25 bp, probe
catgtgctgcctgttgttatgggtt

SEQ ID NO: 838 - DNA, 25 bp, probe
taaacacttcctttgagggagagca

SEQ ID NO: 839 - DNA, 25 bp, probe
agctgtggtttctccagtaaatatt

SEQ ID NO: 840 - DNA, 25 bp, probe
atattttcttctactgaacatggag

SEQ ID NO: 841 - DNA, 25 bp, probe
tactgaacatggagccattattaag

SEQ ID NO: 842 - DNA, 25 bp, probe
agatttagattctgatgctaactgc

SEQ ID NO: 843 - DNA, 25 bp, probe
gatttagattctgatgctaactgca

SEQ ID NO: 844 - DNA, 25 bp, probe
ttagattctgatgctaactgcaaat

SEQ ID NO: 845 - DNA, 25 bp, probe
tctgatgctaactgcaaatcaggtt

SEQ ID NO: 846 - DNA, 25 bp, probe
gatgctaactgcaaatcaggttggt

SEQ ID NO: 847 - DNA, 25 bp, probe
gctaactgcaaatcaggttggtctc

SEQ ID NO: 848 - DNA, 25 bp, probe
ctaactgcaaatcaggttggtctct

SEQ ID NO: 849 - DNA, 25 bp, probe
tgcaaatcaggttggtctctgctgg

SEQ ID NO: 850 - DNA, 25 bp, probe
caaatcaggttggtctctgctgggt

SEQ ID NO: 851 - DNA, 25 bp, probe
ggttggtctctgctgggtctctcct

SEQ ID NO: 852 - DNA, 25 bp, probe
gttggtctctgctgggtctctcctg

SEQ ID NO: 853 - DNA, 25 bp, probe
ctcttttgtggtacattatctcatg

SEQ ID NO: 854 - DNA, 25 bp, probe
tcttttgtggtacattatctcatgc

SEQ ID NO: 855 - DNA, 25 bp, probe
tccccctagggctcaggcactgagg

SEQ ID NO: 856 - DNA, 25 bp, probe
tggagggtaccctatttacaactga

SEQ ID NO: 857 - DNA, 25 bp, probe
cctatttacaactgagtcagccaag

SEQ ID NO: 858 - DNA, 25 bp, probe
ctatttacaactgagtcagccaagc

SEQ ID NO: 859 - DNA, 25 bp, probe
atttacaactgagtcagccaagcca

SEQ ID NO: 860 - DNA, 25 bp, probe
actgagtcagccaagccactgatgg

SEQ ID NO: 861 - DNA, 25 bp, probe
ccaagccactgatgggaatatacag

SEQ ID NO: 862 - DNA, 25 bp, probe
tattttccacggatgagtcacaatc

SEQ ID NO: 863 - DNA, 25 bp, probe
tttccacggatgagtcacaatctga

SEQ ID NO: 864 - DNA, 25 bp, probe
tgagtcacaatctgaagaatcaaac

SEQ ID NO: 865 - DNA, 25 bp, probe
aaccacttgccatcctgttagattg

SEQ ID NO: 866 - DNA, 25 bp, probe
ccatcctgttagattgccagttcct

SEQ ID NO: 867 - DNA, 25 bp, probe
atcctgttagattgccagttcctgg

SEQ ID NO: 868 - DNA, 25 bp, probe
attgagggcctccaggacttggcaa

SEQ ID NO: 869 - DNA, 25 bp, probe
gcctccaggacttggcaagtcttgg

SEQ ID NO: 870 - DNA, 25 bp, probe
tgggcaggcaaatctgtccgttctc

SEQ ID NO: 871 - DNA, 25 bp, probe
ggacacaggctccaaactggagctt

SEQ ID NO: 872 - DNA, 25 bp, probe
tccaaactggagcttgaaatagtgt

SEQ ID NO: 873 - DNA, 25 bp, probe
agttcccttctcgtccaaaggagca

SEQ ID NO: 874 - DNA, 25 bp, probe
gttcccttctcgtccaaaggagcag

SEQ ID NO: 875 - DNA, 25 bp, probe
ttcccttctcgtccaaaggagcagg

SEQ ID NO: 876 - DNA, 25 bp, probe
tcccttctcgtccaaaggagcaggg

SEQ ID NO: 877 - DNA, 25 bp, probe
ccttctcgtccaaaggagcagggaa

SEQ ID NO: 878 - DNA, 25 bp, probe
cttctcgtccaaaggagcagggaat

SEQ ID NO: 879 - DNA, 25 bp, probe
ttctcgtccaaaggagcagggaatg

SEQ ID NO: 880 - DNA, 25 bp, probe
tctcgtccaaaggagcagggaatgg

SEQ ID NO: 881 - DNA, 25 bp, probe
aaggaacccaagagtctgtgcctct

SEQ ID NO: 882 - DNA, 25 bp, probe
aggaacccaagagtctgtgcctctg

SEQ ID NO: 883 - DNA, 25 bp, probe
ggaacccaagagtctgtgcctctga

SEQ ID NO: 884 - DNA, 25 bp, probe
gaacccaagagtctgtgcctctgag

SEQ ID NO: 885 - DNA, 25 bp, probe
aacccaagagtctgtgcctctgagg

SEQ ID NO: 886 - DNA, 25 bp, probe
cccaagagtctgtgcctctgaggcc

SEQ ID NO: 887 - DNA, 25 bp, probe
ccacgcactagctcggttattggtt

SEQ ID NO: 888 - DNA, 25 bp, probe
tctcccacatctggttattgacaag

SEQ ID NO: 889 - DNA, 25 bp, probe
catctggttattgacaagtgtaact

SEQ ID NO: 890 - DNA, 25 bp, probe
aagggggtcactcacaagctgtagc

SEQ ID NO: 891 - DNA, 25 bp, probe
tcactcacaagctgtagctgccata

SEQ ID NO: 892 - DNA, 25 bp, probe
agctgccatacatgcccatctagct

SEQ ID NO: 893 - DNA, 25 bp, probe
ccatacatgcccatctagcttgcag

SEQ ID NO: 894 - DNA, 25 bp, probe
gcccatctagcttgcagtctcttcg

SEQ ID NO: 895 - DNA, 25 bp, probe
ttcgctgtctctcttattatgactg

SEQ ID NO: 896 - DNA, 25 bp, probe
gctgtctctcttattatgactgtgt

SEQ ID NO: 897 - DNA, 25 bp, probe
ctgtgtttatctgaaacttgaagac

SEQ ID NO: 898 - DNA, 25 bp, probe
ttatctgaaacttgaagacaagtct

SEQ ID NO: 899 - DNA, 25 bp, probe
gtctgttaaaatggttcctgagccg

SEQ ID NO: 900 - DNA, 25 bp, probe
ttaaaatggttcctgagccgtctgt

SEQ ID NO: 901 - DNA, 25 bp, probe
aaatggttcctgagccgtctgtacc

SEQ ID NO: 902 - DNA, 25 bp, probe
gttcctgagccgtctgtaccactgc

SEQ ID NO: 903 - DNA, 25 bp, probe
tgctgtgtctcctgggtctgcccac

SEQ ID NO: 904 - DNA, 25 bp, probe
aatgggccccagacaagcctttggt

SEQ ID NO: 905 - DNA, 25 bp, probe
tgggccccagacaagcctttggtgg

SEQ ID NO: 906 - DNA, 25 bp, probe
gaacctccgcatcgtgtagttttgt

SEQ ID NO: 907 - DNA, 25 bp, probe
tccgcatcgtgtagttttgtgacat

SEQ ID NO: 908 - DNA, 25 bp, probe
cataaggagacctcctacttgagct

SEQ ID NO: 909 - DNA, 25 bp, probe
tcctacttgagctgtctgtacccca

SEQ ID NO: 910 - DNA, 25 bp, probe
cttgagctgtctgtaccccagaatc

SEQ ID NO: 911 - DNA, 25 bp, probe
ctgcactcaaggtggcaggacccaa

SEQ ID NO: 912 - DNA, 25 bp, probe
tcaaggtggcaggacccaatttctg

SEQ ID NO: 913 - DNA, 25 bp, probe
gtggcaggacccaatttctgtttta

SEQ ID NO: 914 - DNA, 25 bp, probe
ggacccaatttctgttttatatgtt

SEQ ID NO: 915 - DNA, 25 bp, probe
atatgttcatgaactttaaacctgg

SEQ ID NO: 916 - DNA, 25 bp, probe
tgaactttaaacctggaaacatgtc

SEQ ID NO: 917 - DNA, 25 bp, probe
acctggaaacatgtccttactaggt

SEQ ID NO: 918 - DNA, 25 bp, probe
aacatgtccttactaggtgttttat

SEQ ID NO: 919 - DNA, 25 bp, probe
gacaggttctgttttcactttttcg

SEQ ID NO: 920 - DNA, 25 bp, probe
tgtatgcagtactaaggagactatc

SEQ ID NO: 921 - DNA, 25 bp, probe
gtatcagggagattgtctgattctc

SEQ ID NO: 922 - DNA, 25 bp, probe
ttgccctttgtacacaagttcccag

SEQ ID NO: 923 - DNA, 25 bp, probe
taatatgaacatgtacagcgtgcat

SEQ ID NO: 924 - DNA, 25 bp, probe
tatgaacatgtacagcgtgcatagg

SEQ ID NO: 925 - DNA, 25 bp, probe
cttgccttaaggagtgtaaacttga

SEQ ID NO: 926 - DNA, 25 bp, probe
cacctttgtcaaataccagatttgg

SEQ ID NO: 927 - DNA, 25 bp, probe
ctttgtcaaataccagatttggctt

SEQ ID NO: 928 - DNA, 25 bp, probe
tgtcaaataccagatttggcttcgt

SEQ ID NO: 929 - DNA, 25 bp, probe
caaataccagatttggcttcgtgct

SEQ ID NO: 930 - DNA, 25 bp, probe
ttggcttcgtgctcttctctgtctg

SEQ ID NO: 931 - DNA, 25 bp, probe
gcttcgtgctcttctctgtctgggc

SEQ ID NO: 932 - DNA, 25 bp, probe
tgctcttctctgtctgggctcattt

SEQ ID NO: 933 - DNA, 25 bp, probe
tctgggctcatttctttgtccatag

SEQ ID NO: 934 - DNA, 25 bp, probe
gggctcatttctttgtccatagact

SEQ ID NO: 935 - DNA, 25 bp, probe
ttaccctaaaactttctgtgtctgg

SEQ ID NO: 936 - DNA, 25 bp, probe
gtaccctctgagtaggcctataatt

SEQ ID NO: 937 - DNA, 25 bp, probe
tataattcctaccttgactgtgtgc

SEQ ID NO: 938 - DNA, 25 bp, probe
tgtgtgcatcatttgtaagctagca

SEQ ID NO: 939 - DNA, 25 bp, probe
catcatttgtaagctagcagatcta

SEQ ID NO: 940 - DNA, 25 bp, probe
agagagagctcctttcgccatgttt

SEQ ID NO: 941 - DNA, 25 bp, probe
gctcctttcgccatgttttaccagt

SEQ ID NO: 942 - DNA, 25 bp, probe
tttcgccatgttttaccagtctgct

SEQ ID NO: 943 - DNA, 25 bp, probe
gtctgctgttataacctcttaggtt

SEQ ID NO: 944 - DNA, 25 bp, probe
cagttgctggacagtttgaggatgc

SEQ ID NO: 945 - DNA, 25 bp, probe
gcctcttccactctggagtgaagtt

SEQ ID NO: 946 - DNA, 25 bp, probe
gaaccagttctttcttgagacagac

SEQ ID NO: 947 - DNA, 25 bp, probe
gttctttcttgagacagactatact

SEQ ID NO: 948 - DNA, 25 bp, probe
tcttgagacagactatactgagaca

SEQ ID NO: 949 - DNA, 25 bp, probe
ttgtcaccagcagaagatagataat

SEQ ID NO: 950 - DNA, 25 bp, probe
tcaccagcagaagatagataatatg

SEQ ID NO: 951 - DNA, 25 bp, probe
taagaaacacttgcagctctagtat

SEQ ID NO: 952 - DNA, 25 bp, probe
gcagctctagtattcacttgagtct

SEQ ID NO: 953 - DNA, 25 bp, probe
tgagtcttcctgtttttcctgtacc

SEQ ID NO: 954 - DNA, 25 bp, probe
gttaaaacctgacgatttctgcagg

SEQ ID NO: 955 - DNA, 25 bp, probe
atttctgcaggctgtgtaagcatgt

SEQ ID NO: 956 - DNA, 25 bp, probe
tttctgcaggctgtgtaagcatgtt

SEQ ID NO: 957 - DNA, 25 bp, probe
gtgtaagcatgtttacctgttggct

SEQ ID NO: 958 - DNA, 25 bp, probe
gtaagcatgtttacctgttggcttg

SEQ ID NO: 959 - DNA, 25 bp, probe
taagcatgtttacctgttggcttgc

SEQ ID NO: 960 - DNA, 25 bp, probe
agcatgtttacctgttggcttgctt

SEQ ID NO: 961 - DNA, 25 bp, probe
tgacttgatgctctaaaacagtgta

SEQ ID NO: 962 - DNA, 25 bp, probe
tgtgacccatgagtggaggaacttt

SEQ ID NO: 963 - DNA, 25 bp, probe
gaactttcagttctaaagctgataa

SEQ ID NO: 964 - DNA, 25 bp, probe
tgtaaccactgtcttgatggcaaaa

SEQ ID NO: 965 - DNA, 25 bp, probe
agaactctgtgttatattaccatgg

SEQ ID NO: 966 - DNA, 25 bp, probe
ctgtgttatattaccatggaacgcc

SEQ ID NO: 967 - DNA, 25 bp, probe
aggggactctatcagaactggacca

SEQ ID NO: 968 - DNA, 25 bp, probe
ggggactctatcagaactggaccat

SEQ ID NO: 969 - DNA, 25 bp, probe
aaagtacagaacaaaccctgtgtca

SEQ ID NO: 970 - DNA, 25 bp, probe
agtacagaacaaaccctgtgtcact

SEQ ID NO: 971 - DNA, 25 bp, probe
gtgaacagaactatctcagcatcag

SEQ ID NO: 972 - DNA, 25 bp, probe
acagaactatctcagcatcagaatg

SEQ ID NO: 973 - DNA, 25 bp, probe
ctcagcatcagaatgagaaagcctg

SEQ ID NO: 974 - DNA, 25 bp, probe
aaccaaccacaagcacacaggaagg

SEQ ID NO: 975 - DNA, 25 bp, probe
aggtgaaaatgctttcttggccagg

SEQ ID NO: 976 - DNA, 25 bp, probe
gctttcttggccagggtagtaagaa

SEQ ID NO: 977 - DNA, 25 bp, probe
ttaatgcagggactgtaaaaccacc

SEQ ID NO: 978 - DNA, 25 bp, probe
ggactgtaaaaccaccttttctgct

SEQ ID NO: 979 - DNA, 25 bp, probe
ttcctgtgtagctttgttcattgca

SEQ ID NO: 980 - DNA, 25 bp, probe
ccttcatcatgtcagttccaatgag

SEQ ID NO: 981 - DNA, 25 bp, probe
catcatgtcagttccaatgaggtgg

SEQ ID NO: 982 - DNA, 25 bp, probe
gaaagctttagctgtctctgttttg

SEQ ID NO: 983 - DNA, 25 bp, probe
ctatgccagagtttccagaccttca

SEQ ID NO: 984 - DNA, 25 bp, probe
accttcagcatctgctatgcagaga

SEQ ID NO: 985 - DNA, 25 bp, probe
agcatctgctatgcagagacgggct

SEQ ID NO: 986 - DNA, 25 bp, probe
tgctatgcagagacgggcttgctgg

SEQ ID NO: 987 - DNA, 25 bp, probe
ttgctgggtgcacactttgtctgtg

SEQ ID NO: 988 - DNA, 25 bp, probe
ggtgcacactttgtctgtgaccgaa

SEQ ID NO: 989 - DNA, 25 bp, probe
cactttgtctgtgaccgaatgaaaa

SEQ ID NO: 990 - DNA, 25 bp, probe
gacatgatgttcgtcctgcaagggc

SEQ ID NO: 991 - DNA, 25 bp, probe
atgttcgtcctgcaagggcagtgga

SEQ ID NO: 992 - DNA, 25 bp, probe
aatgccctggtatctcatctagatg

SEQ ID NO: 993 - DNA, 25 bp, probe
ctggtatctcatctagatggcacta

SEQ ID NO: 994 - DNA, 25 bp, probe
ctagatggcactactcctgtgtgtg

SEQ ID NO: 995 - DNA, 25 bp, probe
gatgccagtgtggtacgtgagatct

SEQ ID NO: 996 - DNA, 25 bp, probe
agtgtggtacgtgagatctgctcca

SEQ ID NO: 997 - DNA, 25 bp, probe
ctcctctaacctgtgccacaggtga

SEQ ID NO: 998 - DNA, 25 bp, probe
taacctgtgccacaggtgaccacca

SEQ ID NO: 999 - DNA, 25 bp, probe
tatccttcatctacctaaaaagggg

SEQ ID NO: 1000 - DNA, 25 bp, probe
aaccaggaaccatgtgccaagttgc

SEQ ID NO: 1001 - DNA, 25 bp, probe
gcaggactcacaatagtgcatcttg

SEQ ID NO: 1002 - DNA, 25 bp, probe
actcacaatagtgcatcttggtccg

SEQ ID NO: 1003 - DNA, 25 bp, probe
ctcacaatagtgcatcttggtccga

SEQ ID NO: 1004 - DNA, 25 bp, probe
agtgcatcttggtccgatactctga

SEQ ID NO: 1005 - DNA, 25 bp, probe
ggtccgatactctgagagaagtcaa

SEQ ID NO: 1006 - DNA, 25 bp, probe
atactctgagagaagtcaatatcac

SEQ ID NO: 1007 - DNA, 25 bp, probe
aatatggtttgtgctggaagcctcc

SEQ ID NO: 1008 - DNA, 25 bp, probe
atatggtttgtgctggaagcctccg

SEQ ID NO: 1009 - DNA, 25 bp, probe
gaagagactcgtgcaatggagattc

SEQ ID NO: 1010 - DNA, 25 bp, probe
aagagactcgtgcaatggagattct

SEQ ID NO: 1011 - DNA, 25 bp, probe
agccctttgttgtgcgagggtgttt

SEQ ID NO: 1012 - DNA, 25 bp, probe
cctcgtgggcctggtgtctatattc

SEQ ID NO: 1013 - DNA, 25 bp, probe
gaaacacctcaactggataattatg

SEQ ID NO: 1014 - DNA, 25 bp, probe
ccgtttcctttcatttactgtggct

SEQ ID NO: 1015 - DNA, 25 bp, probe
acgccgagatgaccacacggatggt

SEQ ID NO: 1016 - DNA, 25 bp, probe
ccacacggatggtggcgtccaagat

SEQ ID NO: 1017 - DNA, 25 bp, probe
tggcgtccaagatggagctacacgc

SEQ ID NO: 1018 - DNA, 25 bp, probe
gcatcctgcgccagacgctcttcag

SEQ ID NO: 1019 - DNA, 25 bp, probe
tgactggaccgcagctctacggtgt

SEQ ID NO: 1020 - DNA, 25 bp, probe
gaccgcagctctacggtgtgcatcc

SEQ ID NO: 1021 - DNA, 25 bp, probe
agctctacggtgtgcatccccatgg

SEQ ID NO: 1022 - DNA, 25 bp, probe
cagccctgggctctggtcaggacgc

SEQ ID NO: 1023 - DNA, 25 bp, probe
ggttccagccgaacatgacgctgga

SEQ ID NO: 1024 - DNA, 25 bp, probe
tgatcacaaagactggcgccaagct

SEQ ID NO: 1025 - DNA, 25 bp, probe
caaagactggcgccaagctgctgcg

SEQ ID NO: 1026 - DNA, 25 bp, probe
ctggcgccaagctgctgcggacact

SEQ ID NO: 1027 - DNA, 25 bp, probe
tgctgcggacactgagctcacccac

SEQ ID NO: 1028 - DNA, 25 bp, probe
tgcctggaaccacagctgtcctgac

SEQ ID NO: 1029 - DNA, 25 bp, probe
gaaccacagctgtcctgacccagac

SEQ ID NO: 1030 - DNA, 25 bp, probe
tcctgacccagacagtgaagccact

SEQ ID NO: 1031 - DNA, 25 bp, probe
ctcggatcatggtttcctcatgagg

SEQ ID NO: 1032 - DNA, 25 bp, probe
cggatcatggtttcctcatgaggac

SEQ ID NO: 1033 - DNA, 25 bp, probe
atggtttcctcatgaggacaaatac

SEQ ID NO: 1034 - DNA, 25 bp, probe
tttcctcatgaggacaaatacctga

SEQ ID NO: 1035 - DNA, 25 bp, probe
ctcatgaggacaaatacctgatttt

SEQ ID NO: 1036 - DNA, 25 bp, probe
aatacctgattttgaataaagcagc

SEQ ID NO: 1037 - DNA, 25 bp, probe
atacctgattttgaataaagcagca

SEQ ID NO: 1038 - DNA, 25 bp, probe
taaagcagcattcagttgaaataac

SEQ ID NO: 1039 - DNA, 25 bp, probe
ttgaaataaccctttctgtggtaat

SEQ ID NO: 1040 - DNA, 25 bp, probe
tgaaataaccctttctgtggtaatt

SEQ ID NO: 1041 - DNA, 25 bp, probe
accctttctgtggtaattccaagtg

SEQ ID NO: 1042 - DNA, 25 bp, probe
ccctttctgtggtaattccaagtga

SEQ ID NO: 1043 - DNA, 25 bp, probe
ctttctgtggtaattccaagtgaat

SEQ ID NO: 1044 - DNA, 25 bp, probe
tttcttctaggtgatgagtttctac

SEQ ID NO: 1045 - DNA, 25 bp, probe
ttcttctaggtgatgagtttctact

SEQ ID NO: 1046 - DNA, 25 bp, probe
tcttctaggtgatgagtttctactt

SEQ ID NO: 1047 - DNA, 25 bp, probe
gttgcagacggaggtcaggtcttcc

SEQ ID NO: 1048 - DNA, 25 bp, probe
agcaaacgcccacagatggcccaga

SEQ ID NO: 1049 - DNA, 25 bp, probe
caaacgcccacagatggcccagagg

SEQ ID NO: 1050 - DNA, 25 bp, probe
aacgcccacagatggcccagaggtg

SEQ ID NO: 1051 - DNA, 25 bp, probe
attagaatctgtttgcaaattgtcc

SEQ ID NO: 1052 - DNA, 25 bp, probe
agaatctgtttgcaaattgtccaac

SEQ ID NO: 1053 - DNA, 25 bp, probe
gaatctgtttgcaaattgtccaacc

SEQ ID NO: 1054 - DNA, 25 bp, probe
cccctcaacatgaggggcttccatt

SEQ ID NO: 1055 - DNA, 25 bp, probe
catgaggggcttccattttctgtgt

SEQ ID NO: 1056 - DNA, 25 bp, probe
tgtaagggaactgtttccttcatgc

SEQ ID NO: 1057 - DNA, 25 bp, probe
aagggaactgtttccttcatgccgc

SEQ ID NO: 1058 - DNA, 25 bp, probe
actgtttccttcatgccgccatgtt

SEQ ID NO: 1059 - DNA, 25 bp, probe
atgccgccatgttcctgatattagt

SEQ ID NO: 1060 - DNA, 25 bp, probe
cgccatgttcctgatattagttctg

SEQ ID NO: 1061 - DNA, 25 bp, probe
gccatgttcctgatattagttctga

SEQ ID NO: 1062 - DNA, 25 bp, probe
ccatgttcctgatattagttctgat

SEQ ID NO: 1063 - DNA, 25 bp, probe
gctcggctgaaccaggactcctcac

SEQ ID NO: 1064 - DNA, 25 bp, probe
aggactcctcactgtctacctgaga

SEQ ID NO: 1065 - DNA, 25 bp, probe
actgtctacctgagagaatgagcac

SEQ ID NO: 1066 - DNA, 25 bp, probe
tccatctcagcatcaacacaatttc

SEQ ID NO: 1067 - DNA, 25 bp, probe
agcatcaacacaatttccaggggac

SEQ ID NO: 1068 - DNA, 25 bp, probe
gggacctcaggtctacctcaggact

SEQ ID NO: 1069 - DNA, 25 bp, probe
ctccttgaatctgagactggctgcc

SEQ ID NO: 1070 - DNA, 25 bp, probe
tctgagactggctgcccattctgag

SEQ ID NO: 1071 - DNA, 25 bp, probe
gctgcccattctgagatggggatga

SEQ ID NO: 1072 - DNA, 25 bp, probe
agctgccttgataccagctctctgt

SEQ ID NO: 1073 - DNA, 25 bp, probe
gataccagctctctgtggaaacccc

SEQ ID NO: 1074 - DNA, 25 bp, probe
cccccgaggagttggatctggagaa

SEQ ID NO: 1075 - DNA, 25 bp, probe
cactcaggacttctctcctgaagaa

SEQ ID NO: 1076 - DNA, 25 bp, probe
acttctctcctgaagaacacgcagt

SEQ ID NO: 1077 - DNA, 25 bp, probe
ctgaagaacacgcagtgctaaaact

SEQ ID NO: 1078 - DNA, 25 bp, probe
aactgaggatgatttccctaatgct

SEQ ID NO: 1079 - DNA, 25 bp, probe
cggcagggctgctacctcctcagag

SEQ ID NO: 1080 - DNA, 25 bp, probe
tacctcctcagagtttcagaagccc

SEQ ID NO: 1081 - DNA, 25 bp, probe
gaatgccggcatgctggtctttccg

SEQ ID NO: 1082 - DNA, 25 bp, probe
ctttccgacctggtgctcttctgct

SEQ ID NO: 1083 - DNA, 25 bp, probe
atcctctggcagaaatcagctagac

SEQ ID NO: 1084 - DNA, 25 bp, probe
gctagacgctataccgtggactctc

SEQ ID NO: 1085 - DNA, 25 bp, probe
gcagcctgagagctccaaggaacaa

SEQ ID NO: 1086 - DNA, 25 bp, probe
tgagagctccaaggaacaagctgtg

SEQ ID NO: 1087 - DNA, 25 bp, probe
ggaacaagctgtgacaaccaggagc

SEQ ID NO: 1088 - DNA, 25 bp, probe
gttcgtctgcccagggcctggagcc

SEQ ID NO: 1089 - DNA, 25 bp, probe
acttgggaagtgatgggtgtgtcat

SEQ ID NO: 1090 - DNA, 25 bp, probe
gtgtcatgttgcgtgtgtctgtctg

SEQ ID NO: 1091 - DNA, 25 bp, probe
gtgagcctttcacacctgtgctggc

SEQ ID NO: 1092 - DNA, 25 bp, probe
ctttcacacctgtgctggcgctgga

SEQ ID NO: 1093 - DNA, 25 bp, probe
atttgtgctcagctgacatttaaca

SEQ ID NO: 1094 - DNA, 25 bp, probe
tttatacagaacattcaggatttgt

SEQ ID NO: 1095 - DNA, 25 bp, probe
actggaggaacctccacttgttttg

SEQ ID NO: 1096 - DNA, 25 bp, probe
cctccacttgttttggctgctgcaa

SEQ ID NO: 1097 - DNA, 25 bp, probe
atatcgagaggacttgtctgcacat

SEQ ID NO: 1098 - DNA, 25 bp, probe
cgagaggacttgtctgcacatctca

SEQ ID NO: 1099 - DNA, 25 bp, probe
cttgtctgcacatctcatggtagct

SEQ ID NO: 1100 - DNA, 25 bp, probe
tgtctgcacatctcatggtagctgg

SEQ ID NO: 1101 - DNA, 25 bp, probe
tgcacatctcatggtagctggctgg

SEQ ID NO: 1102 - DNA, 25 bp, probe
tctcatggtagctggctgggaccaa

SEQ ID NO: 1103 - DNA, 25 bp, probe
ccaacgtgaaggaggtcaggtatat

SEQ ID NO: 1104 - DNA, 25 bp, probe
atgctgactcgacagccttttgcca

SEQ ID NO: 1105 - DNA, 25 bp, probe
tggctccggcagcacctttatctat

SEQ ID NO: 1106 - DNA, 25 bp, probe
ggcagcacctttatctatggttatg

SEQ ID NO: 1107 - DNA, 25 bp, probe
agccaggcatgtctcccgaggagtg

SEQ ID NO: 1108 - DNA, 25 bp, probe
cacagacgctattgctctggccatg

SEQ ID NO: 1109 - DNA, 25 bp, probe
attgctctggccatgagccgggatg

SEQ ID NO: 1110 - DNA, 25 bp, probe
ttttgtaataaactctctagggcca

SEQ ID NO: 1111 - DNA, 25 bp, probe
gctctgaagtccactgactcatcac

SEQ ID NO: 1112 - DNA, 25 bp, probe
tcttagcctggctcctctcaagggc

SEQ ID NO: 1113 - DNA, 25 bp, probe
tcaagggcattctgggcttgtaaac

SEQ ID NO: 1114 - DNA, 25 bp, probe
ctcagggtacctgacttgaggggaa

SEQ ID NO: 1115 - DNA, 25 bp, probe
gaagctgaacttcaagcatatttcc

SEQ ID NO: 1116 - DNA, 25 bp, probe
agtacattctttcagagtctgtttt

SEQ ID NO: 1117 - DNA, 25 bp, probe
agccccaggccattccacttagtgt

SEQ ID NO: 1118 - DNA, 25 bp, probe
cttagtgtcttttcaatgataggca

SEQ ID NO: 1119 - DNA, 25 bp, probe
gatatctgagttgaacttcggtgct

SEQ ID NO: 1120 - DNA, 25 bp, probe
gtgcctggtggtatattgggcattc

SEQ ID NO: 1121 - DNA, 25 bp, probe
tgcctggtggtatattgggcattct

SEQ ID NO: 1122 - DNA, 25 bp, probe
gtgttctgaggtgagagagtcttcc

SEQ ID NO: 1123 - DNA, 25 bp, probe
aggtgagagagtcttcccgaggcat

SEQ ID NO: 1124 - DNA, 25 bp, probe
cttcccgaggcatcctgtctgtgct

SEQ ID NO: 1125 - DNA, 25 bp, probe
tcctgtctgtgcttccaaccctgaa

SEQ ID NO: 1126 - DNA, 25 bp, probe
cctgggctgtcaagtggatagatag

SEQ ID NO: 1127 - DNA, 25 bp, probe
cacgtcaaaagcaatgataggcatt

SEQ ID NO: 1128 - DNA, 25 bp, probe
aatcacggaagcaggatagaaatcc

SEQ ID NO: 1129 - DNA, 25 bp, probe
tagaaatccagctgcagacaagacc

SEQ ID NO: 1130 - DNA, 25 bp, probe
tactcacctaggacagtcaggcaga

SEQ ID NO: 1131 - DNA, 25 bp, probe
gacagtcaggcagaagtatgcaaaa

SEQ ID NO: 1132 - DNA, 25 bp, probe
atgcaaaatgactggggctgattct

SEQ ID NO: 1133 - DNA, 25 bp, probe
aagagttcaacatgtctaggtccaa

SEQ ID NO: 1134 - DNA, 25 bp, probe
ccaagaccactgttgtgtttgaagg

SEQ ID NO: 1135 - DNA, 25 bp, probe
gatgtaaaaccctgctgcataggat

SEQ ID NO: 1136 - DNA, 25 bp, probe
cctgctgcataggatggaatatttg

SEQ ID NO: 1137 - DNA, 25 bp, probe
ggatcctgaaaaacatgagggatca

SEQ ID NO: 1138 - DNA, 25 bp, probe
atcctgaaaaacatgagggatcaaa

SEQ ID NO: 1139 - DNA, 25 bp, probe
gggatcaaatagtcctcaactttct

SEQ ID NO: 1140 - DNA, 25 bp, probe
agggagcagctatttgccatctacc

SEQ ID NO: 1141 - DNA, 25 bp, probe
ggagcagctatttgccatctaccct

SEQ ID NO: 1142 - DNA, 25 bp, probe
cgccatctaccctgtagaataaaga

SEQ ID NO: 1143 - DNA, 25 bp, probe
ccacaggctgcactcgaggagatcc

SEQ ID NO: 1144 - DNA, 25 bp, probe
ctgtccattggcatgcttctgctgg

SEQ ID NO: 1145 - DNA, 25 bp, probe
tgtccattggcatgcttctgctggg

SEQ ID NO: 1146 - DNA, 25 bp, probe
tccattggcatgcttctgctgggtg

SEQ ID NO: 1147 - DNA, 25 bp, probe
cttctgctgggtgagcaggacagct

SEQ ID NO: 1148 - DNA, 25 bp, probe
ctgtccccagcgaagaatccggctg

SEQ ID NO: 1149 - DNA, 25 bp, probe
tgtccccagcgaagaatccggctgc

SEQ ID NO: 1150 - DNA, 25 bp, probe
tcccaggacctttgcacaggactga

SEQ ID NO: 1151 - DNA, 25 bp, probe
ggacctttgcacaggactgatgggt

SEQ ID NO: 1152 - DNA, 25 bp, probe
ccagaagccaccttgacacttttga

SEQ ID NO: 1153 - DNA, 25 bp, probe
cagaagccaccttgacacttttgaa

SEQ ID NO: 1154 - DNA, 25 bp, probe
gcttctcaagtctaaccagcctcag

SEQ ID NO: 1155 - DNA, 25 bp, probe
ctaaccagcctcagcagtgtgcata

SEQ ID NO: 1156 - DNA, 25 bp, probe
agcctcagcagtgtgcatagaccat

SEQ ID NO: 1157 - DNA, 25 bp, probe
agcagtgtgcatagaccatttccag

SEQ ID NO: 1158 - DNA, 25 bp, probe
tgcatagaccatttccaggagggtc

SEQ ID NO: 1159 - DNA, 25 bp, probe
tgccctgggcctgaagcgctactgc

SEQ ID NO: 1160 - DNA, 25 bp, probe
gaagcgctactgctgccgccggatg

SEQ ID NO: 1161 - DNA, 25 bp, probe
cctgatcgagaagctgctcaattat

SEQ ID NO: 1162 - DNA, 25 bp, probe
cgagaagctgctcaattatgcaccc

SEQ ID NO: 1163 - DNA, 25 bp, probe
caattatgcacccctggagaagtga

SEQ ID NO: 1164 - DNA, 25 bp, probe
tgcacccctggagaagtgaccacgc

SEQ ID NO: 1165 - DNA, 25 bp, probe
ctgtgctgaccatgggccctgagcg

SEQ ID NO: 1166 - DNA, 25 bp, probe
catgatcatccctgtacgctgcttc

SEQ ID NO: 1167 - DNA, 25 bp, probe
ccccgaattcacgaggctgaggcat

SEQ ID NO: 1168 - DNA, 25 bp, probe
tccgggagctggcgtaatgcctggc

SEQ ID NO: 1169 - DNA, 25 bp, probe
agctggcgtaatgcctggccgcagt

SEQ ID NO: 1170 - DNA, 25 bp, probe
gcctggccgcagtgtgtgtgtatcc

SEQ ID NO: 1171 - DNA, 25 bp, probe
ccgcagtgtgtgtgtatcccatacc

SEQ ID NO: 1172 - DNA, 25 bp, probe
tgtacgctgcttcacttgtggcaag

SEQ ID NO: 1173 - DNA, 25 bp, probe
ctgcttcacttgtggcaagatcgtc

SEQ ID NO: 1174 - DNA, 25 bp, probe
ttacctggggctgctgcaggccgag

SEQ ID NO: 1175 - DNA, 25 bp, probe
tgggttcaggattccatggaccacc

SEQ ID NO: 1176 - DNA, 25 bp, probe
aggattccatggaccacctggacaa

SEQ ID NO: 1177 - DNA, 25 bp, probe
ttccatggaccacctggacaagcaa

SEQ ID NO: 1178 - DNA, 25 bp, probe
actccgaagacttgaacactcactc

SEQ ID NO: 1179 - DNA, 25 bp, probe
cgaagacttgaacactcactccaca

SEQ ID NO: 1180 - DNA, 25 bp, probe
ttgaacactcactccacaacccaag

SEQ ID NO: 1181 - DNA, 25 bp, probe
cacaacccaagaatctgcagctaac

SEQ ID NO: 1182 - DNA, 25 bp, probe
acccaagaatctgcagctaacttat

SEQ ID NO: 1183 - DNA, 25 bp, probe
aacattatgccttaagtaatgttaa

SEQ ID NO: 1184 - DNA, 25 bp, probe
agtttatctttcatggtactagtgt

SEQ ID NO: 1185 - DNA, 25 bp, probe
gaaattgcttttcctcttgaaccac

SEQ ID NO: 1186 - DNA, 25 bp, probe
tttcctcttgaaccacagttctacc

SEQ ID NO: 1187 - DNA, 25 bp, probe
ttgaaccacagttctacccctggga

SEQ ID NO: 1188 - DNA, 25 bp, probe
cagttctacccctgggatgttttga

SEQ ID NO: 1189 - DNA, 25 bp, probe
tacccctgggatgttttgagggtct

SEQ ID NO: 1190 - DNA, 25 bp, probe
tgttttgagggtctttgcaagaatc

SEQ ID NO: 1191 - DNA, 25 bp, probe
ctcaccctaaaactaagcgtgctgc

SEQ ID NO: 1192 - DNA, 25 bp, probe
aaactaagcgtgctgcttctgcaaa

SEQ ID NO: 1193 - DNA, 25 bp, probe
agcgtgctgcttctgcaaaagattt

SEQ ID NO: 1194 - DNA, 25 bp, probe
ctgcttctgcaaaagatttttgtag

SEQ ID NO: 1195 - DNA, 25 bp, probe
tttttgtagatgagctgtgtgcctc

SEQ ID NO: 1196 - DNA, 25 bp, probe
tttgtagatgagctgtgtgcctcag

SEQ ID NO: 1197 - DNA, 25 bp, probe
gtgtgcctcagaattgctatttcaa

SEQ ID NO: 1198 - DNA, 25 bp, probe
gcctcagaattgctatttcaaattg

SEQ ID NO: 1199 - DNA, 25 bp, probe
tcatttggtcttctaaaatgggatc

SEQ ID NO: 1200 - DNA, 25 bp, probe
ttggtcttctaaaatgggatcatgc

SEQ ID NO: 1201 - DNA, 25 bp, probe
gggatcatgcccatttagattttcc

SEQ ID NO: 1202 - DNA, 25 bp, probe
ggatcatgcccatttagattttcct

SEQ ID NO: 1203 - DNA, 25 bp, probe
ttgctcactgcctatttaatgtagc

SEQ ID NO: 1204 - DNA, 25 bp, probe
gctcactgcctatttaatgtagcta

SEQ ID NO: 1205 - DNA, 25 bp, probe
gcctttaattgttctcataatgaag

SEQ ID NO: 1206 - DNA, 25 bp, probe
agtaggtatccctccatgcccttct

SEQ ID NO: 1207 - DNA, 25 bp, probe
cactccagaggcagggacccagaac

SEQ ID NO: 1208 - DNA, 25 bp, probe
tctggaccccactggcaggcactga

SEQ ID NO: 1209 - DNA, 25 bp, probe
gaccccactggcaggcactgacgga

SEQ ID NO: 1210 - DNA, 25 bp, probe
ggggctcagccctgcaagactcagc

SEQ ID NO: 1211 - DNA, 25 bp, probe
atggaccccagtcaagtgttcccgc

SEQ ID NO: 1212 - DNA, 25 bp, probe
aagacactggaggtgcagttaggtc

SEQ ID NO: 1213 - DNA, 25 bp, probe
acactggaggtgcagttaggtcgcc

SEQ ID NO: 1214 - DNA, 25 bp, probe
tcgccgcgggaaagtttggactctt

SEQ ID NO: 1215 - DNA, 25 bp, probe
cgccgcgggaaagtttggactcttg

SEQ ID NO: 1216 - DNA, 25 bp, probe
gaaagtttggactcttgcctggtgg

SEQ ID NO: 1217 - DNA, 25 bp, probe
actcttgcctggtggtctcgtcccg

SEQ ID NO: 1218 - DNA, 25 bp, probe
tcctccttccggttcttggtctagg

SEQ ID NO: 1219 - DNA, 25 bp, probe
ccggttcttggtctaggctgcctgt

SEQ ID NO: 1220 - DNA, 25 bp, probe
gtctaggctgcctgtctcgagctcc

SEQ ID NO: 1221 - DNA, 25 bp, probe
cccggccttgtcctggttggctggc

SEQ ID NO: 1222 - DNA, 25 bp, probe
cgcgggacaggatccggtaaactga

SEQ ID NO: 1223 - DNA, 25 bp, probe
ggcttcatctccatcaatcactgag

SEQ ID NO: 1224 - DNA, 25 bp, probe
aagggatcaccctcatcatcttggt

SEQ ID NO: 1225 - DNA, 25 bp, probe
catcttggtcctttgggggaccttg

SEQ ID NO: 1226 - DNA, 25 bp, probe
agtcaacccttctactatgtcagag

SEQ ID NO: 1227 - DNA, 25 bp, probe
tctactatgtcagagaagttatcca

SEQ ID NO: 1228 - DNA, 25 bp, probe
ctactatgtcagagaagttatccaa

SEQ ID NO: 1229 - DNA, 25 bp, probe
cataaggctgggtctgccctcatgg

SEQ ID NO: 1230 - DNA, 25 bp, probe
ctgggtctgccctcatggtattata

SEQ ID NO: 1231 - DNA, 25 bp, probe
tgggtctgccctcatggtattatat

SEQ ID NO: 1232 - DNA, 25 bp, probe
aagactccaatgagcagcgacttgt

SEQ ID NO: 1233 - DNA, 25 bp, probe
ttgatccactactgggaaccatatg

SEQ ID NO: 1234 - DNA, 25 bp, probe
tctgcttggtctccataacctcctg

SEQ ID NO: 1235 - DNA, 25 bp, probe
cctggttacactgatgtttcaagtg

SEQ ID NO: 1236 - DNA, 25 bp, probe
ctggttacactgatgtttcaagtgc

SEQ ID NO: 1237 - DNA, 25 bp, probe
tcatcttggaacaaagtgtcagggt

SEQ ID NO: 1238 - DNA, 25 bp, probe
ttttcctttgcgtccacgaggcaca

SEQ ID NO: 1239 - DNA, 25 bp, probe
gctgttgcccttctccggttgtgtg

SEQ ID NO: 1240 - DNA, 25 bp, probe
cttctccggttgtgtgtacagtatg

SEQ ID NO: 1241 - DNA, 25 bp, probe
ctccggttgtgtgtacagtatgtgt

SEQ ID NO: 1242 - DNA, 25 bp, probe
caagctgttctttgtttcataattg

SEQ ID NO: 1243 - DNA, 25 bp, probe
tggattcatcaatcccgtagctacc

SEQ ID NO: 1244 - DNA, 25 bp, probe
acagtcaagtgttttccaatgtggt

SEQ ID NO: 1245 - DNA, 25 bp, probe
tcaagtgttttccaatgtggttgtc

SEQ ID NO: 1246 - DNA, 25 bp, probe
aagtgttttccaatgtggttgtccg

SEQ ID NO: 1247 - DNA, 25 bp, probe
tttccaatgtggttgtccggtttct

SEQ ID NO: 1248 - DNA, 25 bp, probe
tccaatgtggttgtccggtttctat

SEQ ID NO: 1249 - DNA, 25 bp, probe
gtggttgtccggtttctatggcctt

SEQ ID NO: 1250 - DNA, 25 bp, probe
ggttgtccggtttctatggccttgc

SEQ ID NO: 1251 - DNA, 25 bp, probe
tatggccttgctgtgtactttccct

SEQ ID NO: 1252 - DNA, 25 bp, probe
gccttgctgtgtactttccctcttt

SEQ ID NO: 1253 - DNA, 25 bp, probe
gtgtactttccctctttttgacagt

SEQ ID NO: 1254 - DNA, 25 bp, probe
ttacttttcaggtttgtactacaag

SEQ ID NO: 1255 - DNA, 25 bp, probe
cgggaatttcctacagtgcccttgg

SEQ ID NO: 1256 - DNA, 25 bp, probe
ttgaattggatcacctcacagtttc

SEQ ID NO: 1257 - DNA, 25 bp, probe
cacagtttcaggagatgtgacattt

SEQ ID NO: 1258 - DNA, 25 bp, probe
gaacggttatcatcattgcaaatca

SEQ ID NO: 1259 - DNA, 25 bp, probe
tgtctggaaaccttcgcatcttgga

SEQ ID NO: 1260 - DNA, 25 bp, probe
gctagtttcttacaatgaaatgttc

SEQ ID NO: 1261 - DNA, 25 bp, probe
tacaatgaaatgttctctaggattc

SEQ ID NO: 1262 - DNA, 25 bp, probe
ttactatgttactgtaccctgcagt

SEQ ID NO: 1263 - DNA, 25 bp, probe
ctatgttactgtaccctgcagtgtt

SEQ ID NO: 1264 - DNA, 25 bp, probe
tgtaccctgcagtgttgatttttaa

SEQ ID NO: 1265 - DNA, 25 bp, probe
agttttctgcagtatgcttttagtc

SEQ ID NO: 1266 - DNA, 25 bp, probe
ctgcagtatgcttttagtctaagaa

SEQ ID NO: 1267 - DNA, 25 bp, probe
atgcttttagtctaagaaaagcaca

SEQ ID NO: 1268 - DNA, 25 bp, probe
gcaatactttccttctttgaagaga

SEQ ID NO: 1269 - DNA, 25 bp, probe
ccaaaagttagttcatcttaaagtg

SEQ ID NO: 1270 - DNA, 25 bp, probe
tgtttaatcttaaaactgggcaact

SEQ ID NO: 1271 - DNA, 25 bp, probe
cttcattggataacttgaaggcttt

SEQ ID NO: 1272 - DNA, 25 bp, probe
tgacagttccctcatctttgagatg

SEQ ID NO: 1273 - DNA, 25 bp, probe
cagttccctcatctttgagatgcac

SEQ ID NO: 1274 - DNA, 25 bp, probe
catctttgagatgcactgatcactg

SEQ ID NO: 1275 - DNA, 25 bp, probe
ctttgagatgcactgatcactgtgc

SEQ ID NO: 1276 - DNA, 25 bp, probe
gatgcactgatcactgtgcttgaaa

SEQ ID NO: 1277 - DNA, 25 bp, probe
gcactgatcactgtgcttgaaaaag

SEQ ID NO: 1278 - DNA, 25 bp, probe
ctgatcactgtgcttgaaaaagaca

SEQ ID NO: 1279 - DNA, 25 bp, probe
atcactgtgcttgaaaaagacaata

SEQ ID NO: 1280 - DNA, 25 bp, probe
aggatgactaatcgttctgcttctg

SEQ ID NO: 1281 - DNA, 25 bp, probe
actaatcgttctgcttctgagtaca

SEQ ID NO: 1282 - DNA, 25 bp, probe
cgttctgcttctgagtacattttcc

SEQ ID NO: 1283 - DNA, 25 bp, probe
tctgtcaaggtacacagcggtgcct

SEQ ID NO: 1284 - DNA, 25 bp, probe
gtcaaggtacacagcggtgcctttg

SEQ ID NO: 1285 - DNA, 25 bp, probe
cacagcggtgcctttgtaaatgttc

SEQ ID NO: 1286 - DNA, 25 bp, probe
agcggtgcctttgtaaatgttcatt

SEQ ID NO: 1287 - DNA, 25 bp, probe
cctgctgcgccgtggagatgatgca

SEQ ID NO: 1288 - DNA, 25 bp, probe
agatgatgcacatggcagcaccccg

SEQ ID NO: 1289 - DNA, 25 bp, probe
cgctacgacatggaccgctttggcg

SEQ ID NO: 1290 - DNA, 25 bp, probe
tttggcgtggtcttccgcgccagcc

SEQ ID NO: 1291 - DNA, 25 bp, probe
cgcgccagtccgacgtcatgatcgt

SEQ ID NO: 1292 - DNA, 25 bp, probe
gtggccggcacactcaccaacaaga

SEQ ID NO: 1293 - DNA, 25 bp, probe
gccggcacactcaccaacaagatgg

SEQ ID NO: 1294 - DNA, 25 bp, probe
caagatggccccagcgcttcgcaag

SEQ ID NO: 1295 - DNA, 25 bp, probe
accagatgccggagccgcgctacgt

SEQ ID NO: 1296 - DNA, 25 bp, probe
ctccatggggagctgcgccaacgga

SEQ ID NO: 1297 - DNA, 25 bp, probe
gaggaggctactaccactattccta

SEQ ID NO: 1298 - DNA, 25 bp, probe
ccactattcctactcggtggtgagg

SEQ ID NO: 1299 - DNA, 25 bp, probe
gtgcccgtggacatctacatcccag

SEQ ID NO: 1300 - DNA, 25 bp, probe
ggatgacctcgtcaactgggcccgc

SEQ ID NO: 1301 - DNA, 25 bp, probe
ccggagttctctgtggcccatgacc

SEQ ID NO: 1302 - DNA, 25 bp, probe
tgtggcccatgaccttcggcctggc

SEQ ID NO: 1303 - DNA, 25 bp, probe
gcaacttttctctgaatgcagcctt

SEQ ID NO: 1304 - DNA, 25 bp, probe
gaatgcagcctttgagatcaagctg

SEQ ID NO: 1305 - DNA, 25 bp, probe
agcctttgagatcaagctgcactgg

SEQ ID NO: 1306 - DNA, 25 bp, probe
caagctgcactggatggcggtgacc

SEQ ID NO: 1307 - DNA, 25 bp, probe
ggcggtgaccgcagcagtactcttc

SEQ ID NO: 1308 - DNA, 25 bp, probe
atggtccaaggttggcatcggaaac

SEQ ID NO: 1309 - DNA, 25 bp, probe
tccaaggttggcatcggaaaccacc

SEQ ID NO: 1310 - DNA, 25 bp, probe
ccaaggttggcatcggaaaccacct

SEQ ID NO: 1311 - DNA, 25 bp, probe
acctcctgtggcttcttgttagtcc

SEQ ID NO: 1312 - DNA, 25 bp, probe
tagctgccactgtcccagagcagag

SEQ ID NO: 1313 - DNA, 25 bp, probe
gcttcttgttagtcccagttttgga

SEQ ID NO: 1314 - DNA, 25 bp, probe
ggggccttttgcactgcccagttac

SEQ ID NO: 1315 - DNA, 25 bp, probe
ggccttttgcactgcccagttacct

SEQ ID NO: 1316 - DNA, 25 bp, probe
tttgcactgcccagttacctgtatg

SEQ ID NO: 1317 - DNA, 25 bp, probe
gccactgtcccagagcagaggactg

SEQ ID NO: 1318 - DNA, 25 bp, probe
ctgtatggtggctcctggtagcatc

SEQ ID NO: 1319 - DNA, 25 bp, probe
actcaaagcctcctgcctatacggg

SEQ ID NO: 1320 - DNA, 25 bp, probe
ccttgggctctatgggaaggaccag

SEQ ID NO: 1321 - DNA, 25 bp, probe
aatgacggcgtggaggacctccgct

SEQ ID NO: 1322 - DNA, 25 bp, probe
aggacctccgctgcaaatacatctc

SEQ ID NO: 1323 - DNA, 25 bp, probe
atgactatgtgaaggcactgcccgg

SEQ ID NO: 1324 - DNA, 25 bp, probe
atgtgaaggcactgcccgggcaact

SEQ ID NO: 1325 - DNA, 25 bp, probe
tgcccgggcaactgaagccttttga

SEQ ID NO: 1326 - DNA, 25 bp, probe
aactgaagccttttgagaccctgct

SEQ ID NO: 1327 - DNA, 25 bp, probe
ttttgagaccctgctgtcccagaac

SEQ ID NO: 1328 - DNA, 25 bp, probe
gcaagaccttcattgtgggagacca

SEQ ID NO: 1329 - DNA, 25 bp, probe
cttgctgctgatccatgaggtccta

SEQ ID NO: 1330 - DNA, 25 bp, probe
tggctgcctggatgcgttccccctg

SEQ ID NO: 1331 - DNA, 25 bp, probe
cccctgctctcagcatatgtggggc

SEQ ID NO: 1332 - DNA, 25 bp, probe
cccatcaatggcaacgggaaacagt

SEQ ID NO: 1333 - DNA, 25 bp, probe
ccatcaatggcaacgggaaacagtg

SEQ ID NO: 1334 - DNA, 25 bp, probe
gcagagtttgccttcctttctccag

SEQ ID NO: 1335 - DNA, 25 bp, probe
ttatttcaggggaattcaacgacct

SEQ ID NO: 1336 - DNA, 25 bp, probe
gccttcatcttggttacagaaaagg

SEQ ID NO: 1337 - DNA, 25 bp, probe
ttcgtgacactagaaattggaaaac

SEQ ID NO: 1338 - DNA, 25 bp, probe
tcgtgacactagaaattggaaaaca

SEQ ID NO: 1339 - DNA, 25 bp, probe
aaggagcagcatttctttctattac

SEQ ID NO: 1340 - DNA, 25 bp, probe
ctactatctatgctgagactggttc

SEQ ID NO: 1341 - DNA, 25 bp, probe
gtgcttctgccaaagcaggtgtgga

SEQ ID NO: 1342 - DNA, 25 bp, probe
ctgccaaagcaggtgtggaagccat

SEQ ID NO: 1343 - DNA, 25 bp, probe
gtgtggaagccatgagcaagtctct

SEQ ID NO: 1344 - DNA, 25 bp, probe
ctcttgcagctgaatggggtaaata

SEQ ID NO: 1345 - DNA, 25 bp, probe
attcaatgtgattcaaccagggcct

SEQ ID NO: 1346 - DNA, 25 bp, probe
atgtgattcaaccagggcctataaa

SEQ ID NO: 1347 - DNA, 25 bp, probe
cccaactggaacatttgagaaagaa

SEQ ID NO: 1348 - DNA, 25 bp, probe
gcagaattccctgtggtcgcctggg

SEQ ID NO: 1349 - DNA, 25 bp, probe
tgcttcttggattaatggagcagtc

SEQ ID NO: 1350 - DNA, 25 bp, probe
cttcttggattaatggagcagtcat

SEQ ID NO: 1351 - DNA, 25 bp, probe
tgagtcctgtgtggagagttacctc

SEQ ID NO: 1352 - DNA, 25 bp, probe
cactaatgtatgtagcgtgtttgtc

SEQ ID NO: 1353 - DNA, 25 bp, probe
ccaaattagatgtgtgctgaagaca

SEQ ID NO: 1354 - DNA, 25 bp, probe
gcaaccagagcaacaaatggcaaac

SEQ ID NO: 1355 - DNA, 25 bp, probe
tctaacactagtgtctacagcagca

SEQ ID NO: 1356 - DNA, 25 bp, probe
agtgtctacagcagcattcaaaaaa

SEQ ID NO: 1357 - DNA, 25 bp, probe
ttcttattgtatacctgattgaagc

SEQ ID NO: 1358 - DNA, 25 bp, probe
tcttattgtatacctgattgaagct

SEQ ID NO: 1359 - DNA, 25 bp, probe
cttattgtatacctgattgaagctg

SEQ ID NO: 1360 - DNA, 25 bp, probe
attgtatacctgattgaagctgttc

SEQ ID NO: 1361 - DNA, 25 bp, probe
ttgtatacctgattgaagctgttct

SEQ ID NO: 1362 - DNA, 25 bp, probe
tgtatacctgattgaagctgttctt

SEQ ID NO: 1363 - DNA, 25 bp, probe
tatacctgattgaagctgttcttgg

SEQ ID NO: 1364 - DNA, 25 bp, probe
atacctgattgaagctgttcttgga

SEQ ID NO: 1365 - DNA, 25 bp, probe
tacctgattgaagctgttcttggag

SEQ ID NO: 1366 - DNA, 25 bp, probe
acctgattgaagctgttcttggaga

SEQ ID NO: 1367 - DNA, 25 bp, probe
gtgtgcatgctgagcaacaccacgg

SEQ ID NO: 1368 - DNA, 25 bp, probe
gtgcatgctgagcaacaccacggcc

SEQ ID NO: 1369 - DNA, 25 bp, probe
gcatgctgagcaacaccacggccat

SEQ ID NO: 1370 - DNA, 25 bp, probe
cgcctggaccataagttcgatctca

SEQ ID NO: 1371 - DNA, 25 bp, probe
gcctggaccataagttcgatctcat

SEQ ID NO: 1372 - DNA, 25 bp, probe
tggaccataagttcgatctcatgta

SEQ ID NO: 1373 - DNA, 25 bp, probe
taagttcgatctcatgtatgccaag

SEQ ID NO: 1374 - DNA, 25 bp, probe
agttcgatctcatgtatgccaagcg

SEQ ID NO: 1375 - DNA, 25 bp, probe
ctcatgtatgccaagcgggcctttg

SEQ ID NO: 1376 - DNA, 25 bp, probe
tcatgtatgccaagcgggcctttgt

SEQ ID NO: 1377 - DNA, 25 bp, probe
gccaagcgggcctttgtgcactggt

SEQ ID NO: 1378 - DNA, 25 bp, probe
caagcgggcctttgtgcactggtac

SEQ ID NO: 1379 - DNA, 25 bp, probe
aagcgggcctttgtgcactggtacg

SEQ ID NO: 1380 - DNA, 25 bp, probe
agcgggcctttgtgcactggtacgt

SEQ ID NO: 1381 - DNA, 25 bp, probe
aggcccgcgaggacctggcagctct

SEQ ID NO: 1382 - DNA, 25 bp, probe
gccaatcagatggtcaagtgtgacc

SEQ ID NO: 1383 - DNA, 25 bp, probe
tctgaaattcatgcaagcttccgaa

SEQ ID NO: 1384 - DNA, 25 bp, probe
agcttccgaagatcttctcaaggaa

SEQ ID NO: 1385 - DNA, 25 bp, probe
cgaagatcttctcaaggaacactac

SEQ ID NO: 1386 - DNA, 25 bp, probe
tcttctcaaggaacactacgttgac

SEQ ID NO: 1387 - DNA, 25 bp, probe
gaaggaccgtccattctttgccggc

SEQ ID NO: 1388 - DNA, 25 bp, probe
caactgtgagcgtaccttcattgcg

SEQ ID NO: 1389 - DNA, 25 bp, probe
ttctttgccggcctggtgaaataca

SEQ ID NO: 1390 - DNA, 25 bp, probe
caaccctgcagactccaagcctggg

SEQ ID NO: 1391 - DNA, 25 bp, probe
gcagactccaagcctgggaccatcc

SEQ ID NO: 1392 - DNA, 25 bp, probe
tccaagcctgggaccatccgtggag

SEQ ID NO: 1393 - DNA, 25 bp, probe
tacatggcagtgattctgtggagag

SEQ ID NO: 1394 - DNA, 25 bp, probe
cattgcgatcaaaccagatggggtc

SEQ ID NO: 1395 - DNA, 25 bp, probe
agaaggagatcggcttgtggtttca

SEQ ID NO: 1396 - DNA, 25 bp, probe
agatcggcttgtggtttcaccctga

SEQ ID NO: 1397 - DNA, 25 bp, probe
cttgtggtttcaccctgaggaactg

SEQ ID NO: 1398 - DNA, 25 bp, probe
tcaccctgaggaactggtagattac

SEQ ID NO: 1399 - DNA, 25 bp, probe
ggaaggcacgaagtctctaaagcat

SEQ ID NO: 1400 - DNA, 25 bp, probe
aaggcacgaagtctctaaagcatcc

SEQ ID NO: 1401 - DNA, 25 bp, probe
aggcacgaagtctctaaagcatcca

SEQ ID NO: 1402 - DNA, 25 bp, probe
gcacgaagtctctaaagcatccaga

SEQ ID NO: 1403 - DNA, 25 bp, probe
cacgaagtctctaaagcatccagaa

SEQ ID NO: 1404 - DNA, 25 bp, probe
acgaagtctctaaagcatccagaag

SEQ ID NO: 1405 - DNA, 25 bp, probe
cgaagtctctaaagcatccagaaga

SEQ ID NO: 1406 - DNA, 25 bp, probe
gaagtctctaaagcatccagaagac

SEQ ID NO: 1407 - DNA, 25 bp, probe
aagtctctaaagcatccagaagacc

SEQ ID NO: 1408 - DNA, 25 bp, probe
agtctctaaagcatccagaagaccc

SEQ ID NO: 1409 - DNA, 25 bp, probe
gtctctaaagcatccagaagacccc

SEQ ID NO: 1410 - DNA, 25 bp, probe
gaagacccctacaccagggtctggt

SEQ ID NO: 1411 - DNA, 25 bp, probe
tacaccagggtctggtccgctccta

SEQ ID NO: 1412 - DNA, 25 bp, probe
acaccagggtctggtccgctcctat

SEQ ID NO: 1413 - DNA, 25 bp, probe
caccagggtctggtccgctcctatt

SEQ ID NO: 1414 - DNA, 25 bp, probe
accagggtctggtccgctcctattc

SEQ ID NO: 1415 - DNA, 25 bp, probe
ctggtgtctcctgcacctgcgctgg

SEQ ID NO: 1416 - DNA, 25 bp, probe
gtgtctcctgcacctgcgctggttc

SEQ ID NO: 1417 - DNA, 25 bp, probe
tgcacctgcgctggttcctgcaagt

SEQ ID NO: 1418 - DNA, 25 bp, probe
tcctgcaagtgcaaagagtgcaaat

SEQ ID NO: 1419 - DNA, 25 bp, probe
agagtgcaaatgcacctcctgcaag

SEQ ID NO: 1420 - DNA, 25 bp, probe
gcaaatgcacctcctgcaagaagag

SEQ ID NO: 1421 - DNA, 25 bp, probe
caaatgcacctcctgcaagaagagc

SEQ ID NO: 1422 - DNA, 25 bp, probe
aaatgcacctcctgcaagaagagct

SEQ ID NO: 1423 - DNA, 25 bp, probe
cctcctgcaagaagagctgctgctc

SEQ ID NO: 1424 - DNA, 25 bp, probe
ctcctgcaagaagagctgctgctcc

SEQ ID NO: 1425 - DNA, 25 bp, probe
tcctgcaagaagagctgctgctcct

SEQ ID NO: 1426 - DNA, 25 bp, probe
cctgcaagaagagctgctgctcctg

SEQ ID NO: 1427 - DNA, 25 bp, probe
tgtgcccagggctgtgtttgcaaag

SEQ ID NO: 1428 - DNA, 25 bp, probe
cattccttttcctgtgaaatatgtg

SEQ ID NO: 1429 - DNA, 25 bp, probe
attccttttcctgtgaaatatgtga

SEQ ID NO: 1430 - DNA, 25 bp, probe
ttccttttcctgtgaaatatgtgag

SEQ ID NO: 1431 - DNA, 25 bp, probe
ttttactgggttcttaaccagatgg

SEQ ID NO: 1432 - DNA, 25 bp, probe
tactgggttcttaaccagatggttg

SEQ ID NO: 1433 - DNA, 25 bp, probe
ccagatggttgtgtatgggtagcac

SEQ ID NO: 1434 - DNA, 25 bp, probe
gtagcactactaaaagtttagaact

SEQ ID NO: 1435 - DNA, 25 bp, probe
agcactactaaaagtttagaacttg

SEQ ID NO: 1436 - DNA, 25 bp, probe
aagtttagaacttgcagtgtctttc

SEQ ID NO: 1437 - DNA, 25 bp, probe
agaacttgcagtgtctttcggaatt

SEQ ID NO: 1438 - DNA, 25 bp, probe
aacttgcagtgtctttcggaatttt

SEQ ID NO: 1439 - DNA, 25 bp, probe
acttgcagtgtctttcggaattttt

SEQ ID NO: 1440 - DNA, 25 bp, probe
cttgcagtgtctttcggaattttta

SEQ ID NO: 1441 - DNA, 25 bp, probe
attttagttactgaagccttacaag

SEQ ID NO: 1442 - DNA, 25 bp, probe
gttactgaagccttacaaggttatg

SEQ ID NO: 1443 - DNA, 25 bp, probe
ctgaagccttacaaggttatgtaga

SEQ ID NO: 1444 - DNA, 25 bp, probe
tagagagataccatcttctgtacca

SEQ ID NO: 1445 - DNA, 25 bp, probe
gagagataccatcttctgtaccaaa

SEQ ID NO: 1446 - DNA, 25 bp, probe
cttctgtaccaaaaatagacaagag

SEQ ID NO: 1447 - DNA, 25 bp, probe
aaagcagcactgagaaacttttgat

SEQ ID NO: 1448 - DNA, 25 bp, probe
gtaagagcaagtgtcccatgaatgt

SEQ ID NO: 1449 - DNA, 25 bp, probe
aagtgtcccatgaatgtgatttcct

SEQ ID NO: 1450 - DNA, 25 bp, probe
cccatgaatgtgatttcctgggttc

SEQ ID NO: 1451 - DNA, 25 bp, probe
aatgtgatttcctgggttctcactg

SEQ ID NO: 1452 - DNA, 25 bp, probe
tgggttctcactgtctttgcaccac

SEQ ID NO: 1453 - DNA, 25 bp, probe
ctcactgtctttgcaccacgtctag

SEQ ID NO: 1454 - DNA, 25 bp, probe
gtctttgcaccacgtctaggaagaa

SEQ ID NO: 1455 - DNA, 25 bp, probe
tctttgcaccacgtctaggaagaat

SEQ ID NO: 1456 - DNA, 25 bp, probe
gagtagagttcctggttgcttttca

SEQ ID NO: 1457 - DNA, 25 bp, probe
tcctggttgcttttcataagaggga

SEQ ID NO: 1458 - DNA, 25 bp, probe
tttgtatctctgcaagcagagattt

SEQ ID NO: 1459 - DNA, 25 bp, probe
tctctgcaagcagagatttctcttt

SEQ ID NO: 1460 - DNA, 25 bp, probe
caagcagagatttctctttggtttt

SEQ ID NO: 1461 - DNA, 25 bp, probe
tttggcccatttgtaagtccccatc

SEQ ID NO: 1462 - DNA, 25 bp, probe
cagctggtaggatgtctggtgccaa

SEQ ID NO: 1463 - DNA, 25 bp, probe
ccagatgcaatcaatgccccagtca

SEQ ID NO: 1464 - DNA, 25 bp, probe
agatgcaatcaatgccccagtcacc

SEQ ID NO: 1465 - DNA, 25 bp, probe
aacttcaccaataggaagatctcag

SEQ ID NO: 1466 - DNA, 25 bp, probe
acttcaccaataggaagatctcagt

SEQ ID NO: 1467 - DNA, 25 bp, probe
cagtgcagaggctcgcgagctatag

SEQ ID NO: 1468 - DNA, 25 bp, probe
tatagaagaatcaccagcagcaagt

SEQ ID NO: 1469 - DNA, 25 bp, probe
caagtgtcccaaagaagctgtgatc

SEQ ID NO: 1470 - DNA, 25 bp, probe
agcaaacccaaactccgaagacttg

SEQ ID NO: 1471 - DNA, 25 bp, probe
gcaaacccaaactccgaagacttga

SEQ ID NO: 1472 - DNA, 25 bp, probe
ggaaattgcttttcctcttgaacca

SEQ ID NO: 1473 - DNA, 25 bp, probe
tcttgaaccacagttctacccctgg

SEQ ID NO: 1474 - DNA, 25 bp, probe
gaaccacagttctacccctgggatg

SEQ ID NO: 1475 - DNA, 25 bp, probe
cagttctacccctgggatgttttga

SEQ ID NO: 1476 - DNA, 25 bp, probe
tacccctgggatgttttgagggtct

SEQ ID NO: 1477 - DNA, 25 bp, probe
ccctgggatgttttgagggtctttg

SEQ ID NO: 1478 - DNA, 25 bp, probe
ggtctttgcaagaatcattaataca

SEQ ID NO: 1479 - DNA, 25 bp, probe
tacaaggttgccacacctagttctg

SEQ ID NO: 1480 - DNA, 25 bp, probe
tatcctaggtaagagcccctaaaca

SEQ ID NO: 1481 - DNA, 25 bp, probe
atcctaggtaagagcccctaaacat

SEQ ID NO: 1482 - DNA, 25 bp, probe
ggtaagagcccctaaacatcaagca

SEQ ID NO: 1483 - DNA, 25 bp, probe
gtaagagcccctaaacatcaagcaa

SEQ ID NO: 1484 - DNA, 25 bp, probe
gcccctaaacatcaagcaatctgtg

SEQ ID NO: 1485 - DNA, 25 bp, probe
ccctaaacatcaagcaatctgtgag

SEQ ID NO: 1486 - DNA, 25 bp, probe
taaacatcaagcaatctgtgagtct

SEQ ID NO: 1487 - DNA, 25 bp, probe
aacatcaagcaatctgtgagtctgt

SEQ ID NO: 1488 - DNA, 25 bp, probe
caagcaatctgtgagtctgtaaaga

SEQ ID NO: 1489 - DNA, 25 bp, probe
cacccctgttggaagatgatttctt

SEQ ID NO: 1490 - DNA, 25 bp, probe
acccctgttggaagatgatttcttt

SEQ ID NO: 1491 - DNA, 25 bp, probe
cccctgttggaagatgatttctttg

SEQ ID NO: 1492 - DNA, 25 bp, probe
agatgatttctttgttctttgcaac

SEQ ID NO: 1493 - DNA, 25 bp, probe
ttctttgttctttgcaactatggaa

SEQ ID NO: 1494 - DNA, 25 bp, probe
ttgttctttgcaactatggaagctg

SEQ ID NO: 1495 - DNA, 25 bp, probe
ctgtctttggcagtgagtaaatagc

SEQ ID NO: 1496 - DNA, 25 bp, probe
tgtacctttatttgatctcaagttg

SEQ ID NO: 1497 - DNA, 25 bp, probe
gtacctttatttgatctcaagttgt

SEQ ID NO: 1498 - DNA, 25 bp, probe
tgttactgcagtagtaatcttatgc

SEQ ID NO: 1499 - DNA, 25 bp, probe
ttactgcagtagtaatcttatgcac

SEQ ID NO: 1500 - DNA, 25 bp, probe
gtagtaatcttatgcacacggtgat

SEQ ID NO: 1501 - DNA, 25 bp, probe
tgcacacggtgatttcatgttatat

SEQ ID NO: 1502 - DNA, 25 bp, probe
cacacggtgatttcatgttatatat

SEQ ID NO: 1503 - DNA, 25 bp, probe
gtaggcaactgttttcttagttaca

SEQ ID NO: 1504 - DNA, 25 bp, probe
gcaactgttttcttagttacagaag

SEQ ID NO: 1505 - DNA, 25 bp, probe
caactgttttcttagttacagaagt

SEQ ID NO: 1506 - DNA, 25 bp, probe
tttcttagttacagaagtttcaagc

SEQ ID NO: 1507 - DNA, 25 bp, probe
ttcttagttacagaagtttcaagct

SEQ ID NO: 1508 - DNA, 25 bp, probe
aagtttcaagcttcacttttgtgca

SEQ ID NO: 1509 - DNA, 25 bp, probe
gtttcaagcttcacttttgtgcagt

SEQ ID NO: 1510 - DNA, 25 bp, probe
agcttcacttttgtgcagtagaaac

SEQ ID NO: 1511 - DNA, 25 bp, probe
acagacggacgtcttcctcatctgc

SEQ ID NO: 1512 - DNA, 25 bp, probe
gtcagcccagcctcttatgagaacg

SEQ ID NO: 1513 - DNA, 25 bp, probe
ctcttatgagaacgtccgcgccaag

SEQ ID NO: 1514 - DNA, 25 bp, probe
aacgtccgcgccaagtggttcccag

SEQ ID NO: 1515 - DNA, 25 bp, probe
cgtccgcgccaagtggttcccagaa

SEQ ID NO: 1516 - DNA, 25 bp, probe
ccgcgccaagtggttcccagaagtg

SEQ ID NO: 1517 - DNA, 25 bp, probe
gacaaggacaccatcgagaaactga

SEQ ID NO: 1518 - DNA, 25 bp, probe
ccatcgagaaactgaaggagaagaa

SEQ ID NO: 1519 - DNA, 25 bp, probe
ggcactggccaaggagattgactcg

SEQ ID NO: 1520 - DNA, 25 bp, probe
actggccaaggagattgactcggtg

SEQ ID NO: 1521 - DNA, 25 bp, probe
ccaaggagattgactcggtgaaata

SEQ ID NO: 1522 - DNA, 25 bp, probe
gattgactcggtgaaatacctggag

SEQ ID NO: 1523 - DNA, 25 bp, probe
ttgactcggtgaaatacctggagtg

SEQ ID NO: 1524 - DNA, 25 bp, probe
agagaggcctgaaaaccgtgttcga

SEQ ID NO: 1525 - DNA, 25 bp, probe
agaggcctgaaaaccgtgttcgacg

SEQ ID NO: 1526 - DNA, 25 bp, probe
ttcacgggacgctacagcctgtgcc

SEQ ID NO: 1527 - DNA, 25 bp, probe
gggttgccttgtggtcatgtgtttc

SEQ ID NO: 1528 - DNA, 25 bp, probe
ccttgtggtcatgtgtttcatcaga

SEQ ID NO: 1529 - DNA, 25 bp, probe
ggtcatgtgtttcatcagaattgca

SEQ ID NO: 1530 - DNA, 25 bp, probe
catgtgtttcatcagaattgcattg

SEQ ID NO: 1531 - DNA, 25 bp, probe
ggggccgacattgttgccctgtttg

SEQ ID NO: 1532 - DNA, 25 bp, probe
tgttgccctgtttgccggtggcctt

SEQ ID NO: 1533 - DNA, 25 bp, probe
cctgtttgccggtggccttcttata

SEQ ID NO: 1534 - DNA, 25 bp, probe
caccagcccttgtcaaatgatgtcc

SEQ ID NO: 1535 - DNA, 25 bp, probe
tgtgcaatttgtcctttataagctt

SEQ ID NO: 1536 - DNA, 25 bp, probe
tataagctttgagtatcttacagct

SEQ ID NO: 1537 - DNA, 25 bp, probe
gttagtgcagtgacgggaaatacac

SEQ ID NO: 1538 - DNA, 25 bp, probe
cacattatgctaatgttgatgacag

SEQ ID NO: 1539 - DNA, 25 bp, probe
atcctagcaagactttacaagatag

SEQ ID NO: 1540 - DNA, 25 bp, probe
gagccggtttcttatcctaaatgtt

SEQ ID NO: 1541 - DNA, 25 bp, probe
acaatctctgtccagcacctcttgg

SEQ ID NO: 1542 - DNA, 25 bp, probe
caatctctgtccagcacctcttggt

SEQ ID NO: 1543 - DNA, 25 bp, probe
agcttatttcttgtaccttgcagca

SEQ ID NO: 1544 - DNA, 25 bp, probe
tcttgtaccttgcagcatgctctac

SEQ ID NO: 1545 - DNA, 25 bp, probe
tgcagcatgctctacgcattcagtc

SEQ ID NO: 1546 - DNA, 25 bp, probe
ctctacgcattcagtccttaagggg

SEQ ID NO: 1547 - DNA, 25 bp, probe
gcattcagtccttaaggggtttatt

SEQ ID NO: 1548 - DNA, 25 bp, probe
ttttacaaactgtgcgcctgtaagg

SEQ ID NO: 1549 - DNA, 25 bp, probe
aaactgtgcgcctgtaaggtttatt

SEQ ID NO: 1550 - DNA, 25 bp, probe
tgtgcgcctgtaaggtttattagca

SEQ ID NO: 1551 - DNA, 25 bp, probe
tcatccgtgaaaaacttgcaatacg

SEQ ID NO: 1552 - DNA, 25 bp, probe
aacttgcaatacgagcagtttcaag

SEQ ID NO: 1553 - DNA, 25 bp, probe
tgcaatacgagcagtttcaaggaat

SEQ ID NO: 1554 - DNA, 25 bp, probe
caatacgagcagtttcaaggaataa

SEQ ID NO: 1555 - DNA, 25 bp, probe
tcgaatgtgcctgatgcatgtatta

SEQ ID NO: 1556 - DNA, 25 bp, probe
gaatgtgcctgatgcatgtattatc

SEQ ID NO: 1557 - DNA, 25 bp, probe
gtgcctgatgcatgtattatcgtct

SEQ ID NO: 1558 - DNA, 25 bp, probe
gcctgatgcatgtattatcgtcttt

SEQ ID NO: 1559 - DNA, 25 bp, probe
atggtaccccttctagtgaggattc

SEQ ID NO: 1560 - DNA, 25 bp, probe
ttcttgtgaagtgatgcagctgacc

SEQ ID NO: 1561 - DNA, 25 bp, probe
ttgtgaagtgatgcagctgacctac

SEQ ID NO: 1562 - DNA, 25 bp, probe
tgaagtgatgcagctgacctacctg

SEQ ID NO: 1563 - DNA, 25 bp, probe
gaagtgatgcagctgacctacctgc

SEQ ID NO: 1564 - DNA, 25 bp, probe
aagtgatgcagctgacctacctgcc

SEQ ID NO: 1565 - DNA, 25 bp, probe
agtgatgcagctgacctacctgcca

SEQ ID NO: 1566 - DNA, 25 bp, probe
gtgatgcagctgacctacctgccaa

SEQ ID NO: 1567 - DNA, 25 bp, probe
tgatgcagctgacctacctgccaac

SEQ ID NO: 1568 - DNA, 25 bp, probe
atcatccccattactgatatcaggg

SEQ ID NO: 1569 - DNA, 25 bp, probe
gatatcagggctttcacaacaacac

SEQ ID NO: 1570 - DNA, 25 bp, probe
agttagttatactactgccttaggg

SEQ ID NO: 1571 - DNA, 25 bp, probe
tagttatactactgccttagggctt

SEQ ID NO: 1572 - DNA, 25 bp, probe
tgagactaataaacccagggttact

SEQ ID NO: 1573 - DNA, 25 bp, probe
cagaatgggccaagcgagaccagaa

SEQ ID NO: 1574 - DNA, 25 bp, probe
ctgtgattcttcttcttgaaaggcc

SEQ ID NO: 1575 - DNA, 25 bp, probe
ctttttcagttaacagatcaaatgg

SEQ ID NO: 1576 - DNA, 25 bp, probe
ctcaagttcctttccccagttagag

SEQ ID NO: 1577 - DNA, 25 bp, probe
caagtgttaactgtgggactcactg

SEQ ID NO: 1578 - DNA, 25 bp, probe
cctgctcagagagagatttaatagg

SEQ ID NO: 1579 - DNA, 25 bp, probe
gagatgtgactgaggctggctttcc

SEQ ID NO: 1580 - DNA, 25 bp, probe
gctacagccagtcagaagatttgca

SEQ ID NO: 1581 - DNA, 25 bp, probe
aaatgcgaacacattcctgtgtgag

SEQ ID NO: 1582 - DNA, 25 bp, probe
gaacacattcctgtgtgaggcacgt

SEQ ID NO: 1583 - DNA, 25 bp, probe
gtgtgaggcacgttaccctttgtca

SEQ ID NO: 1584 - DNA, 25 bp, probe
aagcaataagattcagctggtcaga

SEQ ID NO: 1585 - DNA, 25 bp, probe
tcagctggtcagacttttctgggca

SEQ ID NO: 1586 - DNA, 25 bp, probe
acttttctgggcagtctcagtgacg

SEQ ID NO: 1587 - DNA, 25 bp, probe
agtgacgcatttcctgtgctgtgat

SEQ ID NO: 1588 - DNA, 25 bp, probe
gcatttcctgtgctgtgattgttct

SEQ ID NO: 1589 - DNA, 25 bp, probe
cctgtgctgtgattgttctgaagac

SEQ ID NO: 1590 - DNA, 25 bp, probe
cagagtggctctaaccactgtgaga

SEQ ID NO: 1591 - DNA, 25 bp, probe
aaagccgctgtgtcctgcctcagca

SEQ ID NO: 1592 - DNA, 25 bp, probe
ctcagcacaaagacccagtgtcatt

SEQ ID NO: 1593 - DNA, 25 bp, probe
tccagaacctcagcagatctgagcc

SEQ ID NO: 1594 - DNA, 25 bp, probe
accctcagggagatccagagactca

SEQ ID NO: 1595 - DNA, 25 bp, probe
gggagatccagagactcatgcccat

SEQ ID NO: 1596 - DNA, 25 bp, probe
atccagagactcatgcccatggcca

SEQ ID NO: 1597 - DNA, 25 bp, probe
atgcccatggccatccatgcgtgga

SEQ ID NO: 1598 - DNA, 25 bp, probe
ccatggccatccatgcgtggacgct

SEQ ID NO: 1599 - DNA, 25 bp, probe
caggatgacgggatcccgcacaagc

SEQ ID NO: 1600 - DNA, 25 bp, probe
agaattgtgccttgcatattacttg

SEQ ID NO: 1601 - DNA, 25 bp, probe
ttgtgccttgcatattacttgagct

SEQ ID NO: 1602 - DNA, 25 bp, probe
tgccttgcatattacttgagcttaa

SEQ ID NO: 1603 - DNA, 25 bp, probe
tgagcttaaactgacaacctggatg

SEQ ID NO: 1604 - DNA, 25 bp, probe
aaactgacaacctggatgtaaatag

SEQ ID NO: 1605 - DNA, 25 bp, probe
ctgacaacctggatgtaaataggag

SEQ ID NO: 1606 - DNA, 25 bp, probe
aataggagcctttctactggtttat

SEQ ID NO: 1607 - DNA, 25 bp, probe
agaagagctgctgctcctgctgccc

SEQ ID NO: 1608 - DNA, 25 bp, probe
cctgctgccccgtgggctgtagcaa

SEQ ID NO: 1609 - DNA, 25 bp, probe
ccccgtgggctgtagcaagtgtgcc

SEQ ID NO: 1610 - DNA, 25 bp, probe
cccgtgggctgtagcaagtgtgccc

SEQ ID NO: 1611 - DNA, 25 bp, probe
ccgtgggctgtagcaagtgtgccca

SEQ ID NO: 1612 - DNA, 25 bp, probe
ctgtagcaagtgtgcccagggctgt

SEQ ID NO: 1613 - DNA, 25 bp, probe
tgtgcccagggctgtgtttgcaaag

SEQ ID NO: 1614 - DNA, 25 bp, probe
gtgtctcctgcacctgcgctggttc

SEQ ID NO: 1615 - DNA, 25 bp, probe
tgcacctgcgctggttcctgcaagt

SEQ ID NO: 1616 - DNA, 25 bp, probe
tcctgcaagtgcaaagagtgcaaat

SEQ ID NO: 1617 - DNA, 25 bp, probe
agagtgcaaatgcacctcctgcaag

SEQ ID NO: 1618 - DNA, 25 bp, probe
gcaaatgcacctcctgcaagaagag

SEQ ID NO: 1619 - DNA, 25 bp, probe
aaatgcacctcctgcaagaagagct

SEQ ID NO: 1620 - DNA, 25 bp, probe
ctcctgcaagaagagctgctgctcc

SEQ ID NO: 1621 - DNA, 25 bp, probe
tcctgcaagaagagctgctgctcct

SEQ ID NO: 1622 - DNA, 25 bp, probe
cctgcaagaagagctgctgctcctg

SEQ ID NO: 1623 - DNA, 25 bp, probe
tcatgttacggcattgccttttctt

SEQ ID NO: 1624 - DNA, 25 bp, probe
tcctcggctttttagggagcaggaa

SEQ ID NO: 1625 - DNA, 25 bp, probe
aaatgcgtctgagagcaactctttt

SEQ ID NO: 1626 - DNA, 25 bp, probe
gcgtctgagagcaactctttttaaa

SEQ ID NO: 1627 - DNA, 25 bp, probe
aaacctgccctgttgtatataactg

SEQ ID NO: 1628 - DNA, 25 bp, probe
taactgtgtctgtttcaccgtgtga

SEQ ID NO: 1629 - DNA, 25 bp, probe
tcaccgtgtgacctcccaagggggt

SEQ ID NO: 1630 - DNA, 25 bp, probe
cagaagctcgttccttcacactcag

SEQ ID NO: 1631 - DNA, 25 bp, probe
actcagtggcgtctgtgcttgtcca

SEQ ID NO: 1632 - DNA, 25 bp, probe
ttgtgtggactccttaatgccaatc

SEQ ID NO: 1633 - DNA, 25 bp, probe
tgtgtggactccttaatgccaatca

SEQ ID NO: 1634 - DNA, 25 bp, probe
gtggactccttaatgccaatcattt

SEQ ID NO: 1635 - DNA, 25 bp, probe
cgcctgttgacaagtgtggagaaac

SEQ ID NO: 1636 - DNA, 25 bp, probe
ttaaatgtcacagacaatgtcctag

SEQ ID NO: 1637 - DNA, 25 bp, probe
atgtcacagacaatgtcctagtgtt

SEQ ID NO: 1638 - DNA, 25 bp, probe
cagacaatgtcctagtgttgactac

SEQ ID NO: 1639 - DNA, 25 bp, probe
ctgtggctgctttgtgtcaagaaaa

SEQ ID NO: 1640 - DNA, 25 bp, probe
aagagcagtcactctcagaatcttg

SEQ ID NO: 1641 - DNA, 25 bp, probe
gagcagtcactctcagaatcttgat

SEQ ID NO: 1642 - DNA, 25 bp, probe
tgggggtttcagagaccctgaaaga

SEQ ID NO: 1643 - DNA, 25 bp, probe
gcctccttgtctgcacaactgcatg

SEQ ID NO: 1644 - DNA, 25 bp, probe
gtctgcacaactgcatgcacttctc

SEQ ID NO: 1645 - DNA, 25 bp, probe
tcctttcccttcacgtggtctgcag

SEQ ID NO: 1646 - DNA, 25 bp, probe
cttcacgtggtctgcagagagcagg

SEQ ID NO: 1647 - DNA, 25 bp, probe
ggggccacttttcctttgaggctct

SEQ ID NO: 1648 - DNA, 25 bp, probe
ttcctttgaggctctagtggaggtg

SEQ ID NO: 1649 - DNA, 25 bp, probe
gaggtggatgtccttctctgccagg

SEQ ID NO: 1650 - DNA, 25 bp, probe
tccttctctgccaggcttggcacat

SEQ ID NO: 1651 - DNA, 25 bp, probe
caggcttggcacatgatgtgaagaa

SEQ ID NO: 1652 - DNA, 25 bp, probe
aaatgcccaattcttactgttcagg

SEQ ID NO: 1653 - DNA, 25 bp, probe
caattcttactgttcaggtttgatg

SEQ ID NO: 1654 - DNA, 25 bp, probe
atgtggaatcacagctgcagtgata

SEQ ID NO: 1655 - DNA, 25 bp, probe
ggcctccaagtccacagtggaacca

SEQ ID NO: 1656 - DNA, 25 bp, probe
cttctccttagaagtggaagtagtg

SEQ ID NO: 1657 - DNA, 25 bp, probe
tggaagtagtggagcccctgctctg

SEQ ID NO: 1658 - DNA, 25 bp, probe
ggaggccgtccatcccgtcgacgta

SEQ ID NO: 1659 - DNA, 25 bp, probe
gaacctcgaggtttctcaaagaaat

SEQ ID NO: 1660 - DNA, 25 bp, probe
ctcaggtctgttttccgaggcggcc

SEQ ID NO: 1661 - DNA, 25 bp, probe
tcaggtctgttttccgaggcggccc

SEQ ID NO: 1662 - DNA, 25 bp, probe
gaaatccaattggatacgacaactt

SEQ ID NO: 1663 - DNA, 25 bp, probe
tggatacgacaacttgcacgtattt

SEQ ID NO: 1664 - DNA, 25 bp, probe
ttaatagcgtcataactagaactga

SEQ ID NO: 1665 - DNA, 25 bp, probe
gtcataactagaactgaattttgtc

SEQ ID NO: 1666 - DNA, 25 bp, probe
ggtgtatattttctgtgcagccact

SEQ ID NO: 1667 - DNA, 25 bp, probe
gtgtatattttctgtgcagccactg

SEQ ID NO: 1668 - DNA, 25 bp, probe
tgttaagccatgtgttccaaggcat

SEQ ID NO: 1669 - DNA, 25 bp, probe
gccatgtgttccaaggcattttagc

SEQ ID NO: 1670 - DNA, 25 bp, probe
tgtgactcaagacttccagagcctc

SEQ ID NO: 1671 - DNA, 25 bp, probe
gagacgtggcaggagggctcactca

SEQ ID NO: 1672 - DNA, 25 bp, probe
tatacgggcagctccccaagttcca

SEQ ID NO: 1673 - DNA, 25 bp, probe
cccaagttccaggacggagacctca

SEQ ID NO: 1674 - DNA, 25 bp, probe
tctatgggaaggaccagcaggaggc

SEQ ID NO: 1675 - DNA, 25 bp, probe
gtggtctatttcccagttcgaggcc

SEQ ID NO: 1676 - DNA, 25 bp, probe
ggcactgcccgggcaactgaagcct

SEQ ID NO: 1677 - DNA, 25 bp, probe
ggcaactgaagccttttgagaccct

SEQ ID NO: 1678 - DNA, 25 bp, probe
ttttgagaccctgctgtcccagaac

SEQ ID NO: 1679 - DNA, 25 bp, probe
gtcccagaaccagggaggcaagacc

SEQ ID NO: 1680 - DNA, 25 bp, probe
aagaccttcattgtgggagaccaga

SEQ ID NO: 1681 - DNA, 25 bp, probe
ggagaccagatctccttcgctgact

SEQ ID NO: 1682 - DNA, 25 bp, probe
tccttcgctgactacaacctgctgg

SEQ ID NO: 1683 - DNA, 25 bp, probe
gctggacttgctgctgatccatgag

SEQ ID NO: 1684 - DNA, 25 bp, probe
gctgatccatgaggtcctagcccct

SEQ ID NO: 1685 - DNA, 25 bp, probe
tcctagcccctggctgcctggatgc

SEQ ID NO: 1686 - DNA, 25 bp, probe
cggccctgcgcatgctgctggcaga

SEQ ID NO: 1687 - DNA, 25 bp, probe
tcaataagaaaatccctaagcagag

SEQ ID NO: 1688 - DNA, 25 bp, probe
aagcagaggctggagagctacagaa

SEQ ID NO: 1689 - DNA, 25 bp, probe
agctacagaaggaccaccagtagcc

SEQ ID NO: 1690 - DNA, 25 bp, probe
gctacagaaggaccaccagtagcca

SEQ ID NO: 1691 - DNA, 25 bp, probe
tacagaaggaccaccagtagccact

SEQ ID NO: 1692 - DNA, 25 bp, probe
acagaaggaccaccagtagccactg

SEQ ID NO: 1693 - DNA, 25 bp, probe
cagaaggaccaccagtagccactgt

SEQ ID NO: 1694 - DNA, 25 bp, probe
agaaggaccaccagtagccactgtc

SEQ ID NO: 1695 - DNA, 25 bp, probe
accagtagccactgtccccgggaag

SEQ ID NO: 1696 - DNA, 25 bp, probe
cagtagccactgtccccgggaagct

SEQ ID NO: 1697 - DNA, 25 bp, probe
ccaaagctttgaacattcatgactg

SEQ ID NO: 1698 - DNA, 25 bp, probe
caaagctttgaacattcatgactga

SEQ ID NO: 1699 - DNA, 25 bp, probe
agctttgaacattcatgactgaact

SEQ ID NO: 1700 - DNA, 25 bp, probe
tcccttctctacctcatgggggtat

SEQ ID NO: 1701 - DNA, 25 bp, probe
cttgcaagaatcagtgcaaagattt

SEQ ID NO: 1702 - DNA, 25 bp, probe
taagatatgatgtccctatggaagc

SEQ ID NO: 1703 - DNA, 25 bp, probe
aagttaaaacgtcacaaaggtgctg

SEQ ID NO: 1704 - DNA, 25 bp, probe
agttaaaacgtcacaaaggtgctgc

SEQ ID NO: 1705 - DNA, 25 bp, probe
gttaaaacgtcacaaaggtgctgct

SEQ ID NO: 1706 - DNA, 25 bp, probe
ttaaaacgtcacaaaggtgctgctt

SEQ ID NO: 1707 - DNA, 25 bp, probe
aaacgtcacaaaggtgctgctttta

SEQ ID NO: 1708 - DNA, 25 bp, probe
aacgtcacaaaggtgctgcttttac

SEQ ID NO: 1709 - DNA, 25 bp, probe
acgtcacaaaggtgctgcttttaca

SEQ ID NO: 1710 - DNA, 25 bp, probe
gtcacaaaggtgctgcttttacagg

SEQ ID NO: 1711 - DNA, 25 bp, probe
tcacaaaggtgctgcttttacaggg

SEQ ID NO: 1712 - DNA, 25 bp, probe
cacaaaggtgctgcttttacaggga

SEQ ID NO: 1713 - DNA, 25 bp, probe
caaaggtgctgcttttacagggaag

SEQ ID NO: 1714 - DNA, 25 bp, probe
aaaggtgctgcttttacagggaagc

SEQ ID NO: 1715 - DNA, 25 bp, probe
aggtgctgcttttacagggaagctt

SEQ ID NO: 1716 - DNA, 25 bp, probe
gtgctgcttttacagggaagcttat

SEQ ID NO: 1717 - DNA, 25 bp, probe
tgctgcttttacagggaagcttatt

SEQ ID NO: 1718 - DNA, 25 bp, probe
gcttttacagggaagcttattctgt

SEQ ID NO: 1719 - DNA, 25 bp, probe
gtattagccatttgttgtaaatgcc

SEQ ID NO: 1720 - DNA, 25 bp, probe
ttagccatttgttgtaaatgccaat

SEQ ID NO: 1721 - DNA, 25 bp, probe
tagccatttgttgtaaatgccaata

SEQ ID NO: 1722 - DNA, 25 bp, probe
ttcaccaggggcaagaatgtacatt

SEQ ID NO: 1723 - DNA, 25 bp, probe
accaaatgtactttagacatgaatg

SEQ ID NO: 1724 - DNA, 25 bp, probe
atgtactttagacatgaatgcaact

SEQ ID NO: 1725 - DNA, 25 bp, probe
ttaaacttggtcttctttcaagttg

SEQ ID NO: 1726 - DNA, 25 bp, probe
taaacttggtcttctttcaagttgt

SEQ ID NO: 1727 - DNA, 25 bp, probe
tatgaagatgctgtacccacttgaa

SEQ ID NO: 1728 - DNA, 25 bp, probe
tgaagatgctgtacccacttgaaca

SEQ ID NO: 1729 - DNA, 25 bp, probe
gatgctgtacccacttgaacagtcc

SEQ ID NO: 1730 - DNA, 25 bp, probe
atgctgtacccacttgaacagtcct

SEQ ID NO: 1731 - DNA, 25 bp, probe
tacccacttgaacagtcctcaggtg

SEQ ID NO: 1732 - DNA, 25 bp, probe
acccacttgaacagtcctcaggtgt

SEQ ID NO: 1733 - DNA, 25 bp, probe
agtcctcaggtgtttacataaatac

SEQ ID NO: 1734 - DNA, 25 bp, probe
gtcctcaggtgtttacataaatact

SEQ ID NO: 1735 - DNA, 25 bp, probe
ttctcaaatatcgtttacacgttgg

SEQ ID NO: 1736 - DNA, 25 bp, probe
gatctgaagtttttcaccactccag

SEQ ID NO: 1737 - DNA, 25 bp, probe
ccactccagataaagacaatgatcg

SEQ ID NO: 1738 - DNA, 25 bp, probe
cactccagataaagacaatgatcga

SEQ ID NO: 1739 - DNA, 25 bp, probe
actccagataaagacaatgatcgat

SEQ ID NO: 1740 - DNA, 25 bp, probe
agacaatgatcgatatccttctggg

SEQ ID NO: 1741 - DNA, 25 bp, probe
gacaatgatcgatatccttctggga

SEQ ID NO: 1742 - DNA, 25 bp, probe
atgatcgatatccttctgggaactg

SEQ ID NO: 1743 - DNA, 25 bp, probe
tatccttctgggaactgtgggctgt

SEQ ID NO: 1744 - DNA, 25 bp, probe
ttctgggaactgtgggctgtactac

SEQ ID NO: 1745 - DNA, 25 bp, probe
gggctgtactacagttcaggctggt

SEQ ID NO: 1746 - DNA, 25 bp, probe
caggctggtggtttgatgcatgtct

SEQ ID NO: 1747 - DNA, 25 bp, probe
tggtttgatgcatgtctttctgcaa

SEQ ID NO: 1748 - DNA, 25 bp, probe
ggtttgatgcatgtctttctgcaaa

SEQ ID NO: 1749 - DNA, 25 bp, probe
ttgatgcatgtctttctgcaaactt

SEQ ID NO: 1750 - DNA, 25 bp, probe
gctacaagtcctccttcaaagaggc

SEQ ID NO: 1751 - DNA, 25 bp, probe
cacattcctagttccccgtgaactt

SEQ ID NO: 1752 - DNA, 25 bp, probe
ccgtgaacttcctttgacttattgt

SEQ ID NO: 1753 - DNA, 25 bp, probe
tgaacttcctttgacttattgtccc

SEQ ID NO: 1754 - DNA, 25 bp, probe
cttttaatgccttccacattaatta

SEQ ID NO: 1755 - DNA, 25 bp, probe
ttaatgccttccacattaattagat

SEQ ID NO: 1756 - DNA, 25 bp, probe
ccttccacattaattagattttctt

SEQ ID NO: 1757 - DNA, 25 bp, probe
taaagatgccctaagtgttgaagaa

SEQ ID NO: 1758 - DNA, 25 bp, probe
tgccctaagtgttgaagaagagttt

SEQ ID NO: 1759 - DNA, 25 bp, probe
tattaaagcaccaaattcatgtaca

SEQ ID NO: 1760 - DNA, 25 bp, probe
taaagcaccaaattcatgtacagca

SEQ ID NO: 1761 - DNA, 25 bp, probe
agcaccaaattcatgtacagcatgc

SEQ ID NO: 1762 - DNA, 25 bp, probe
aaattcatgtacagcatgcatcacg

SEQ ID NO: 1763 - DNA, 25 bp, probe
ttcatgtacagcatgcatcacggat

SEQ ID NO: 1764 - DNA, 25 bp, probe
atgtacagcatgcatcacggatcaa

SEQ ID NO: 1765 - DNA, 25 bp, probe
atgcatcacggatcaatagactgta

SEQ ID NO: 1766 - DNA, 25 bp, probe
atagactgtacttattttccaataa

SEQ ID NO: 1767 - DNA, 25 bp, probe
catgacatttggtttgggggccctt

SEQ ID NO: 1768 - DNA, 25 bp, probe
tttgggggccctttgaagttgatgc

SEQ ID NO: 1769 - DNA, 25 bp, probe
ttgatgccaagaaggagtgaacact

SEQ ID NO: 1770 - DNA, 25 bp, probe
cccacacaatgaacaaaagggaagg

SEQ ID NO: 1771 - DNA, 25 bp, probe
ctgcctcttggctacgaaggctggc

SEQ ID NO: 1772 - DNA, 25 bp, probe
aggctggcactgagcacccatcctg

SEQ ID NO: 1773 - DNA, 25 bp, probe
ctttcaggaagctctggtttagaag

SEQ ID NO: 1774 - DNA, 25 bp, probe
aagatgtcatatgctcagttcaaat

SEQ ID NO: 1775 - DNA, 25 bp, probe
aacgcaaaagtgatggctcggcggt

SEQ ID NO: 1776 - DNA, 25 bp, probe
gctggtcccacttctgacaccaaaa

SEQ ID NO: 1777 - DNA, 25 bp, probe
tggtcccacttctgacaccaaaatg

SEQ ID NO: 1778 - DNA, 25 bp, probe
agtgccaagggcaccagcagggccc

SEQ ID NO: 1779 - DNA, 25 bp, probe
cctgactgaagactgtctggcaggt

SEQ ID NO: 1780 - DNA, 25 bp, probe
actgtctggcaggtggaacggtcct

SEQ ID NO: 1781 - DNA, 25 bp, probe
tggaacggtccttgtcctctccagc

SEQ ID NO: 1782 - DNA, 25 bp, probe
ggtactgtgcaaagctaatgatctg

SEQ ID NO: 1783 - DNA, 25 bp, probe
accagccaatcctgctgtctcaagg

SEQ ID NO: 1784 - DNA, 25 bp, probe
caatcctgctgtctcaagggtatcc

SEQ ID NO: 1785 - DNA, 25 bp, probe
tacattcagcagaaaaagtgacatt

SEQ ID NO: 1786 - DNA, 25 bp, probe
acattcagcagaaaaagtgacattt

SEQ ID NO: 1787 - DNA, 25 bp, probe
tctattagctgtattcatactttgg

SEQ ID NO: 1788 - DNA, 25 bp, probe
gtattcatactttggttgcttcaga

SEQ ID NO: 1789 - DNA, 25 bp, probe
atactttggttgcttcagactttat

SEQ ID NO: 1790 - DNA, 25 bp, probe
ctattctttacagaaccttgtagtg

SEQ ID NO: 1791 - DNA, 25 bp, probe
tattctttacagaaccttgtagtgc

SEQ ID NO: 1792 - DNA, 25 bp, probe
attctttacagaaccttgtagtgcc

SEQ ID NO: 1793 - DNA, 25 bp, probe
ttctttacagaaccttgtagtgcca

SEQ ID NO: 1794 - DNA, 25 bp, probe
ctttacagaaccttgtagtgccaaa

SEQ ID NO: 1795 - DNA, 25 bp, probe
tttacagaaccttgtagtgccaaaa

SEQ ID NO: 1796 - DNA, 25 bp, probe
ttacagaaccttgtagtgccaaaaa

SEQ ID NO: 1797 - DNA, 25 bp, probe
acagaaccttgtagtgccaaaaact

SEQ ID NO: 1798 - DNA, 25 bp, probe
cagaaccttgtagtgccaaaaactt

SEQ ID NO: 1799 - DNA, 25 bp, probe
ccttggtcctacactttttaggatg

SEQ ID NO: 1800 - DNA, 25 bp, probe
acatccctggttcctatattttggg

SEQ ID NO: 1801 - DNA, 25 bp, probe
cctggttcctatattttgggctatg

SEQ ID NO: 1802 - DNA, 25 bp, probe
ctggttcctatattttgggctatgt

SEQ ID NO: 1803 - DNA, 25 bp, probe
gaaagtaagcccagggcttcagatc

SEQ ID NO: 1804 - DNA, 25 bp, probe
gcccagggcttcagatctaagttag

SEQ ID NO: 1805 - DNA, 25 bp, probe
cccagggcttcagatctaagttagt

SEQ ID NO: 1806 - DNA, 25 bp, probe
taatgctaggcataagcactctata

SEQ ID NO: 1807 - DNA, 25 bp, probe
tgctaggcataagcactctataata

SEQ ID NO: 1808 - DNA, 25 bp, probe
gctaggcataagcactctataatac

SEQ ID NO: 1809 - DNA, 25 bp, probe
aatgtgtctcatacatatgctgtac

SEQ ID NO: 1810 - DNA, 25 bp, probe
tcatacatatgctgtactaggcttc

SEQ ID NO: 1811 - DNA, 25 bp, probe
atatgctgtactaggcttcatcatg

SEQ ID NO: 1812 - DNA, 25 bp, probe
tgtactaggcttcatcatgcatttc

SEQ ID NO: 1813 - DNA, 25 bp, probe
gtactaggcttcatcatgcatttct

SEQ ID NO: 1814 - DNA, 25 bp, probe
gtggtcagagttgtttcatgtcttc

SEQ ID NO: 1815 - DNA, 25 bp, probe
cgaacagtgcgctgagctaccttca

SEQ ID NO: 1816 - DNA, 25 bp, probe
gtgcgctgagctaccttcagagccc

SEQ ID NO: 1817 - DNA, 25 bp, probe
tgagctaccttcagagccccattac

SEQ ID NO: 1818 - DNA, 25 bp, probe
gcagtgcgtatcacgcttcccgcaa

SEQ ID NO: 1819 - DNA, 25 bp, probe
acgcttcccgcaaggacatgctgga

SEQ ID NO: 1820 - DNA, 25 bp, probe
cccgcaaggacatgctggatgcctt

SEQ ID NO: 1821 - DNA, 25 bp, probe
taactgccttgatcaacgtctcagc

SEQ ID NO: 1822 - DNA, 25 bp, probe
ccttgatcaacgtctcagccaattg

SEQ ID NO: 1823 - DNA, 25 bp, probe
acgaggccattgacttcatagactc

SEQ ID NO: 1824 - DNA, 25 bp, probe
ttgcttaccttatgaggactaatcg

SEQ ID NO: 1825 - DNA, 25 bp, probe
accttatgaggactaatcgagtcaa

SEQ ID NO: 1826 - DNA, 25 bp, probe
cctttgagtttgtgaagcagaggcg

SEQ ID NO: 1827 - DNA, 25 bp, probe
ttgagtcccaggtgctggctccgca

SEQ ID NO: 1828 - DNA, 25 bp, probe
tgctggctccgcactgttcggcaga

SEQ ID NO: 1829 - DNA, 25 bp, probe
ctccgcactgttcggcagaggctgg

SEQ ID NO: 1830 - DNA, 25 bp, probe
ccgccatggctgtgctcgaccgagg

SEQ ID NO: 1831 - DNA, 25 bp, probe
gccgtgttagacgtcattcccacag

SEQ ID NO: 1832 - DNA, 25 bp, probe
cccgacgacgtgctcgagttcctga

SEQ ID NO: 1833 - DNA, 25 bp, probe
ccgacgacgtgctcgagttcctgaa

SEQ ID NO: 1834 - DNA, 25 bp, probe
gacgtgctcgagttcctgaaggtgt

SEQ ID NO: 1835 - DNA, 25 bp, probe
ctcgagttcctgaaggtgtatgaga

SEQ ID NO: 1836 - DNA, 25 bp, probe
tatgagaagcactctgcccagtgag

SEQ ID NO: 1837 - DNA, 25 bp, probe
tgagaagcactctgcccagtgagca

SEQ ID NO: 1838 - DNA, 25 bp, probe
ggagaattgcctctacctggacctt

SEQ ID NO: 1839 - DNA, 25 bp, probe
cctggaccttttgtctcacacagca

SEQ ID NO: 1840 - DNA, 25 bp, probe
tgctgtgcaccttacattcctagag

SEQ ID NO: 1841 - DNA, 25 bp, probe
tacattcctagagagcagaaataaa

SEQ ID NO: 1842 - DNA, 25 bp, probe
ttccaccatcaaatgctgtagaatg

SEQ ID NO: 1843 - DNA, 25 bp, probe
ccatcaaatgctgtagaatgcttgg

SEQ ID NO: 1844 - DNA, 25 bp, probe
ttcagctccttatggggcccggtat

SEQ ID NO: 1845 - DNA, 25 bp, probe
gatgttcatcgcactctggtctacg

SEQ ID NO: 1846 - DNA, 25 bp, probe
atgttcatcgcactctggtctacgg

SEQ ID NO: 1847 - DNA, 25 bp, probe
ttaaatgtagcttgtcagatttacc

SEQ ID NO: 1848 - DNA, 25 bp, probe
ctaagtatcttgaattctcagactg

SEQ ID NO: 1849 - DNA, 25 bp, probe
gtatcttgaattctcagactgcaaa

SEQ ID NO: 1850 - DNA, 25 bp, probe
ttctcagactgcaaaaggcctattt

SEQ ID NO: 1851 - DNA, 25 bp, probe
tcagactgcaaaaggcctattttaa

SEQ ID NO: 1852 - DNA, 25 bp, probe
gaaactggaactcagtgttacctta

SEQ ID NO: 1853 - DNA, 25 bp, probe
tggaactcagtgttaccttaaagtt

SEQ ID NO: 1854 - DNA, 25 bp, probe
ttaagtatctatgtacagtaatgcc

SEQ ID NO: 1855 - DNA, 25 bp, probe
agtatctatgtacagtaatgcctca

SEQ ID NO: 1856 - DNA, 25 bp, probe
acagtaatgcctcattcatctagag

SEQ ID NO: 1857 - DNA, 25 bp, probe
tggcagtcttgtgaaaaccgaacac

SEQ ID NO: 1858 - DNA, 25 bp, probe
ttgtgaaaaccgaacacaactcaga

SEQ ID NO: 1859 - DNA, 25 bp, probe
tgtgaaaaccgaacacaactcagaa

SEQ ID NO: 1860 - DNA, 25 bp, probe
caactcagaaacttggaatcgtttt

SEQ ID NO: 1861 - DNA, 25 bp, probe
aatgcctctgagcaacccatataag

SEQ ID NO: 1862 - DNA, 25 bp, probe
tgcctctgagcaacccatataagtc

SEQ ID NO: 1863 - DNA, 25 bp, probe
acttaggacagaagcctacctcatc

SEQ ID NO: 1864 - DNA, 25 bp, probe
gttcatagtgctgttcaggcaaaat

SEQ ID NO: 1865 - DNA, 25 bp, probe
gaacaccttctcttgctagctccag

SEQ ID NO: 1866 - DNA, 25 bp, probe
ttgctagctccaggaaggctttgtg

SEQ ID NO: 1867 - DNA, 25 bp, probe
ctccaggaaggctttgtgggaaatg

SEQ ID NO: 1868 - DNA, 25 bp, probe
cagagttgagcctggacttgaccaa

SEQ ID NO: 1869 - DNA, 25 bp, probe
tttcagcccaagatagctacatgtc

SEQ ID NO: 1870 - DNA, 25 bp, probe
acatgtctttacttgctgtataagt

SEQ ID NO: 1871 - DNA, 25 bp, probe
catgtctttacttgctgtataagtt

SEQ ID NO: 1872 - DNA, 25 bp, probe
ggggtgcctgattgatcctatctct

SEQ ID NO: 1873 - DNA, 25 bp, probe
ggtgcctgattgatcctatctcttc

SEQ ID NO: 1874 - DNA, 25 bp, probe
gtgcctgattgatcctatctcttca

SEQ ID NO: 1875 - DNA, 25 bp, probe
ttcccttctattcaaggccagttag

SEQ ID NO: 1876 - DNA, 25 bp, probe
tcaaggccagttaggaatgcaatta

SEQ ID NO: 1877 - DNA, 25 bp, probe
tggacgcaaggtaccctttctcttt

SEQ ID NO: 1878 - DNA, 25 bp, probe
tcttcctgcacatgctcttctgatg

SEQ ID NO: 1879 - DNA, 25 bp, probe
aaagcagattggagctctgcagtaa

SEQ ID NO: 1880 - DNA, 25 bp, probe
gcacaagtgcagaggctgtggtcat

SEQ ID NO: 1881 - DNA, 25 bp, probe
gcggaacactctgttatttaagatg

SEQ ID NO: 1882 - DNA, 25 bp, probe
cactctgttatttaagatggctatc

SEQ ID NO: 1883 - DNA, 25 bp, probe
taagatggctatccagataatcctg

SEQ ID NO: 1884 - DNA, 25 bp, probe
ggctatccagataatcctgaacact

SEQ ID NO: 1885 - DNA, 25 bp, probe
gataatcctgaacactgtgtattta

SEQ ID NO: 1886 - DNA, 25 bp, probe
tttagactaccagcaaagattaaag

SEQ ID NO: 1887 - DNA, 25 bp, probe
agactaccagcaaagattaaagcat

SEQ ID NO: 1888 - DNA, 25 bp, probe
actaccagcaaagattaaagcatga

SEQ ID NO: 1889 - DNA, 25 bp, probe
cccctacaccaagagtgtatctgtg

SEQ ID NO: 1890 - DNA, 25 bp, probe
tacaccaagagtgtatctgtgaaag

SEQ ID NO: 1891 - DNA, 25 bp, probe
gtgaaagagctcctacactttgaaa

SEQ ID NO: 1892 - DNA, 25 bp, probe
taagaatcccttatcatgaagtttg

SEQ ID NO: 1893 - DNA, 25 bp, probe
agaatcccttatcatgaagtttgcc

SEQ ID NO: 1894 - DNA, 25 bp, probe
ccttatcatgaagtttgcctgttct

SEQ ID NO: 1895 - DNA, 25 bp, probe
gagtgttgagcatccctgtctaacc

SEQ ID NO: 1896 - DNA, 25 bp, probe
gagcatccctgtctaacctgctctt

SEQ ID NO: 1897 - DNA, 25 bp, probe
caggcatttccaattgtagactaaa

SEQ ID NO: 1898 - DNA, 25 bp, probe
ggcatttccaattgtagactaaaac

SEQ ID NO: 1899 - DNA, 25 bp, probe
agcaggaattgcactcagacatgac

SEQ ID NO: 1900 - DNA, 25 bp, probe
gaattgcactcagacatgacatttc

SEQ ID NO: 1901 - DNA, 25 bp, probe
caattcatctctgctaatgaaaagg

SEQ ID NO: 1902 - DNA, 25 bp, probe
aattcatctctgctaatgaaaaggg

SEQ ID NO: 1903 - DNA, 25 bp, probe
tctctgctaatgaaaagggttcttt

SEQ ID NO: 1904 - DNA, 25 bp, probe
aaatgtgtgtgtcagttctgtcagc

SEQ ID NO: 1905 - DNA, 25 bp, probe
tgtgtgtcagttctgtcagctgcaa

SEQ ID NO: 1906 - DNA, 25 bp, probe
cagttctgtcagctgcaagttcttg

SEQ ID NO: 1907 - DNA, 25 bp, probe
tcagctgcaagttcttgtataatga

SEQ ID NO: 1908 - DNA, 25 bp, probe
ctgcaagttcttgtataatgaagtc

SEQ ID NO: 1909 - DNA, 25 bp, probe
taatgaagtcaatgccatcaggcca

SEQ ID NO: 1910 - DNA, 25 bp, probe
aagtcaatgccatcaggccaaggaa

SEQ ID NO: 1911 - DNA, 25 bp, probe
tcttcctggtgatggcagaggggct

SEQ ID NO: 1912 - DNA, 25 bp, probe
ttcctggtgatggcagaggggcttc

SEQ ID NO: 1913 - DNA, 25 bp, probe
ctggtgatggcagaggggcttcttt

SEQ ID NO: 1914 - DNA, 25 bp, probe
aagcctctatgcaccccacaaagtt

SEQ ID NO: 1915 - DNA, 25 bp, probe
ctctatgcaccccacaaagtttctg

SEQ ID NO: 1916 - DNA, 25 bp, probe
ctatgcaccccacaaagtttctgcc

SEQ ID NO: 1917 - DNA, 25 bp, probe
tatgcaccccacaaagtttctgcct

SEQ ID NO: 1918 - DNA, 25 bp, probe
accccacaaagtttctgcctccatg

SEQ ID NO: 1919 - DNA, 25 bp, probe
ccccacaaagtttctgcctccatgc

SEQ ID NO: 1920 - DNA, 25 bp, probe
cccacaaagtttctgcctccatgcc

SEQ ID NO: 1921 - DNA, 25 bp, probe
caaagtttctgcctccatgccgtcc

SEQ ID NO: 1922 - DNA, 25 bp, probe
aagtttctgcctccatgccgtccac

SEQ ID NO: 1923 - DNA, 25 bp, probe
agtttctgcctccatgccgtccaca

SEQ ID NO: 1924 - DNA, 25 bp, probe
gctcctgccttgaagccacgcgctc

SEQ ID NO: 1925 - DNA, 25 bp, probe
ctcctgccttgaagccacgcgctcc

SEQ ID NO: 1926 - DNA, 25 bp, probe
gccttgaagccacgcgctccacgcc

SEQ ID NO: 1927 - DNA, 25 bp, probe
ccccgcaggcgctgtgctagagatg

SEQ ID NO: 1928 - DNA, 25 bp, probe
tgggtgccctgcaccatgaccctga

SEQ ID NO: 1929 - DNA, 25 bp, probe
gggtgccctgcaccatgaccctgag

SEQ ID NO: 1930 - DNA, 25 bp, probe
tgacactgctccacgtgctgcacaa

SEQ ID NO: 1931 - DNA, 25 bp, probe
gacactgctccacgtgctgcacaag

SEQ ID NO: 1932 - DNA, 25 bp, probe
gctccacgtgctgcacaagttccgg

SEQ ID NO: 1933 - DNA, 25 bp, probe
gctagaatccaaatctgccctaggt

SEQ ID NO: 1934 - DNA, 25 bp, probe
ctagaatccaaatctgccctaggtc

SEQ ID NO: 1935 - DNA, 25 bp, probe
tgtctatatcaagatcgtatcccgc

SEQ ID NO: 1936 - DNA, 25 bp, probe
ccgctgacacagaaggctgccgggt

SEQ ID NO: 1937 - DNA, 25 bp, probe
aaaccctaagtgtggatgttcagaa

SEQ ID NO: 1938 - DNA, 25 bp, probe
ccctaagtgtggatgttcagaattt

SEQ ID NO: 1939 - DNA, 25 bp, probe
agagtgcctggcatgcaaggataag

SEQ ID NO: 1940 - DNA, 25 bp, probe
gagtgcctggcatgcaaggataaga

SEQ ID NO: 1941 - DNA, 25 bp, probe
agtgcctggcatgcaaggataagag

SEQ ID NO: 1942 - DNA, 25 bp, probe
cttaataaacgtttgttgcacttgg

SEQ ID NO: 1943 - DNA, 25 bp, probe
ctatgttcctaacaaaatgagatga

SEQ ID NO: 1944 - DNA, 25 bp, probe
aggatagatcctggttaccactctt

SEQ ID NO: 1945 - DNA, 25 bp, probe
ggatagatcctggttaccactcttt

SEQ ID NO: 1946 - DNA, 25 bp, probe
gatagatcctggttaccactctttt

SEQ ID NO: 1947 - DNA, 25 bp, probe
attaagtgtgccaaatcagtttgac

SEQ ID NO: 1948 - DNA, 25 bp, probe
ttaagtgtgccaaatcagtttgact

SEQ ID NO: 1949 - DNA, 25 bp, probe
gtgtgccaaatcagtttgactactc

SEQ ID NO: 1950 - DNA, 25 bp, probe
tgtgccaaatcagtttgactactct

SEQ ID NO: 1951 - DNA, 25 bp, probe
gtgccaaatcagtttgactactctc

SEQ ID NO: 1952 - DNA, 25 bp, probe
gccaaatcagtttgactactctctg

SEQ ID NO: 1953 - DNA, 25 bp, probe
tcagtttgactactctctgttttag

SEQ ID NO: 1954 - DNA, 25 bp, probe
agtttgactactctctgttttagtg

SEQ ID NO: 1955 - DNA, 25 bp, probe
ggcttatttctatgacaaattcaag

SEQ ID NO: 1956 - DNA, 25 bp, probe
tttctatgacaaattcaagagctag

SEQ ID NO: 1957 - DNA, 25 bp, probe
ttctatgacaaattcaagagctaga

SEQ ID NO: 1958 - DNA, 25 bp, probe
tgcacttttagaaatgcatatttgc

SEQ ID NO: 1959 - DNA, 25 bp, probe
ggggatgccgctgacatccggttcg

SEQ ID NO: 1960 - DNA, 25 bp, probe
atggagagtgtctgcggatacttcc

SEQ ID NO: 1961 - DNA, 25 bp, probe
cacaggtcccacaaccgcagcgagg

SEQ ID NO: 1962 - DNA, 25 bp, probe
cgaggagtttctcattgctggaaaa

SEQ ID NO: 1963 - DNA, 25 bp, probe
actgcaggatggactcttgcacatc

SEQ ID NO: 1964 - DNA, 25 bp, probe
ttgcacatcactacctgcagtttcg

SEQ ID NO: 1965 - DNA, 25 bp, probe
cctggaacagcctgagcttagctca

SEQ ID NO: 1966 - DNA, 25 bp, probe
aagacctacactgttggctgtgagg

SEQ ID NO: 1967 - DNA, 25 bp, probe
tgcacagtgtttccctgtttatcca

SEQ ID NO: 1968 - DNA, 25 bp, probe
ctgcagagtggcactcattgcttgt

SEQ ID NO: 1969 - DNA, 25 bp, probe
cattgcttgtggacggaccagctcc

SEQ ID NO: 1970 - DNA, 25 bp, probe
agaagtcaaccagaccaccttatac

SEQ ID NO: 1971 - DNA, 25 bp, probe
tgaaaagggcttccagtcccgtcac

SEQ ID NO: 1972 - DNA, 25 bp, probe
ggcagtccctgcggtcccagatagc

SEQ ID NO: 1973 - DNA, 25 bp, probe
ccagatagcctgaatcctgcccgga

SEQ ID NO: 1974 - DNA, 25 bp, probe
tgcccggagtggaactgaagcctgc

SEQ ID NO: 1975 - DNA, 25 bp, probe
caacaagattggacgttttgtgatc

SEQ ID NO: 1976 - DNA, 25 bp, probe
gacgttttgtgatcgaagaggttcc

SEQ ID NO: 1977 - DNA, 25 bp, probe
cctggtgagctcatgcaggaagacc

SEQ ID NO: 1978 - DNA, 25 bp, probe
ctggtgagctcatgcaggaagacct

SEQ ID NO: 1979 - DNA, 25 bp, probe
ggcaacggatgacgtcatgcttctg

SEQ ID NO: 1980 - DNA, 25 bp, probe
atgacgtcatgcttctggacacctg

SEQ ID NO: 1981 - DNA, 25 bp, probe
tggacacctgggaccaggtctttgt

SEQ ID NO: 1982 - DNA, 25 bp, probe
ccaggtctttgtctgggttggaaag

SEQ ID NO: 1983 - DNA, 25 bp, probe
aagacagaagccttgacttctgcta

SEQ ID NO: 1984 - DNA, 25 bp, probe
gccttgacttctgctaagcggtaca

SEQ ID NO: 1985 - DNA, 25 bp, probe
gctaagcggtacatcgagacggacc

SEQ ID NO: 1986 - DNA, 25 bp, probe
cggtacatcgagacggacccagcca

SEQ ID NO: 1987 - DNA, 25 bp, probe
agccaatcgggatcggcggacgccc

SEQ ID NO: 1988 - DNA, 25 bp, probe
tcaccgtggtgaagcaaggctttga

SEQ ID NO: 1989 - DNA, 25 bp, probe
caccgtggtgaagcaaggctttgag

SEQ ID NO: 1990 - DNA, 25 bp, probe
ccatgtcaccggtcagtgccttttg

SEQ ID NO: 1991 - DNA, 25 bp, probe
ctgccgagcctctttggacccagat

SEQ ID NO: 1992 - DNA, 25 bp, probe
ccgagcctctttggacccagatctg

SEQ ID NO: 1993 - DNA, 25 bp, probe
ctctttggacccagatctgttcatg

SEQ ID NO: 1994 - DNA, 25 bp, probe
agatctgttcatgcttttgtcttcg

SEQ ID NO: 1995 - DNA, 25 bp, probe
catgcttttgtcttcgtcactgcgg

SEQ ID NO: 1996 - DNA, 25 bp, probe
gcttttgtcttcgtcactgcggcgg

SEQ ID NO: 1997 - DNA, 25 bp, probe
gcggggccctttgatgtcttcatct

SEQ ID NO: 1998 - DNA, 25 bp, probe
gggccctttgatgtcttcatctgta

SEQ ID NO: 1999 - DNA, 25 bp, probe
aagttccatgactcgaatatctgaa

SEQ ID NO: 2000 - DNA, 25 bp, probe
ttccatgactcgaatatctgaaatg

SEQ ID NO: 2001 - DNA, 25 bp, probe
ccatgactcgaatatctgaaatgaa

SEQ ID NO: 2002 - DNA, 25 bp, probe
gtccctaaggcgtcctcgagatgaa

SEQ ID NO: 2003 - DNA, 25 bp, probe
tccctaaggcgtcctcgagatgaag

SEQ ID NO: 2004 - DNA, 25 bp, probe
cctaaggcgtcctcgagatgaagac

SEQ ID NO: 2005 - DNA, 25 bp, probe
cagccaggtggagaccccgcaggac

SEQ ID NO: 2006 - DNA, 25 bp, probe
gcgcgtttgtgtctcgggttaaaat

SEQ ID NO: 2007 - DNA, 25 bp, probe
ttcacaggctattctactttaaagg

SEQ ID NO: 2008 - DNA, 25 bp, probe
cacaggctattctactttaaaggaa

SEQ ID NO: 2009 - DNA, 25 bp, probe
caggctattctactttaaaggaagc

SEQ ID NO: 2010 - DNA, 25 bp, probe
ggctattctactttaaaggaagcct

SEQ ID NO: 2011 - DNA, 25 bp, probe
gctattctactttaaaggaagcctt

SEQ ID NO: 2012 - DNA, 25 bp, probe
tttgctgcacacaatctagcaggaa

SEQ ID NO: 2013 - DNA, 25 bp, probe
ttgctgcacacaatctagcaggaat

SEQ ID NO: 2014 - DNA, 25 bp, probe
gcacacaatctagcaggaatctttt

SEQ ID NO: 2015 - DNA, 25 bp, probe
ttttttaagagctgtgtcatcctta

SEQ ID NO: 2016 - DNA, 25 bp, probe
tttaagagctgtgtcatccttatgt

SEQ ID NO: 2017 - DNA, 25 bp, probe
ttaagagctgtgtcatccttatgta

SEQ ID NO: 2018 - DNA, 25 bp, probe
taagagctgtgtcatccttatgtag

SEQ ID NO: 2019 - DNA, 25 bp, probe
agctgtgtcatccttatgtaggcaa

SEQ ID NO: 2020 - DNA, 25 bp, probe
tgtcatccttatgtaggcaagagat

SEQ ID NO: 2021 - DNA, 25 bp, probe
tcatccttatgtaggcaagagatgt

SEQ ID NO: 2022 - DNA, 25 bp, probe
ccttatgtaggcaagagatgtttgc

SEQ ID NO: 2023 - DNA, 25 bp, probe
agtggtccttctgtccgcctgcctg

SEQ ID NO: 2024 - DNA, 25 bp, probe
gtccgcctgcctgtgttggctgcat

SEQ ID NO: 2025 - DNA, 25 bp, probe
ccgcctgcctgtgttggctgcatcg

SEQ ID NO: 2026 - DNA, 25 bp, probe
gaactccactatgcatctctgcaga

SEQ ID NO: 2027 - DNA, 25 bp, probe
gcatctctgcagaggctgccagtgc

SEQ ID NO: 2028 - DNA, 25 bp, probe
ggacctgacctcaggggcagagaca

SEQ ID NO: 2029 - DNA, 25 bp, probe
ggcaccaaggaggatccaagagctg

SEQ ID NO: 2030 - DNA, 25 bp, probe
gatccaagagctgactatgcctgca

SEQ ID NO: 2031 - DNA, 25 bp, probe
gcctgcattgctgagaacaaaccca

SEQ ID NO: 2032 - DNA, 25 bp, probe
agggtccccctgtggtccagccagt

SEQ ID NO: 2033 - DNA, 25 bp, probe
tccccctgtggtccagccagtaaaa

SEQ ID NO: 2034 - DNA, 25 bp, probe
gtggtccagccagtaaaaaccatgg

SEQ ID NO: 2035 - DNA, 25 bp, probe
tccagccagtaaaaaccatggtccc

SEQ ID NO: 2036 - DNA, 25 bp, probe
cttctgtgtctcagtcctctcagtc

SEQ ID NO: 2037 - DNA, 25 bp, probe
gtgtctcagtcctctcagtccatct

SEQ ID NO: 2038 - DNA, 25 bp, probe
atcaaaacttatgtggctttttgac

SEQ ID NO: 2039 - DNA, 25 bp, probe
caacggctgtcagctgctgcttggg

SEQ ID NO: 2040 - DNA, 25 bp, probe
aagccctggacgatctgcacaagat

SEQ ID NO: 2041 - DNA, 25 bp, probe
cctggacgatctgcacaagatgaac

SEQ ID NO: 2042 - DNA, 25 bp, probe
gacgatctgcacaagatgaaccacg

SEQ ID NO: 2043 - DNA, 25 bp, probe
ctgcacaagatgaaccacgtgacac

SEQ ID NO: 2044 - DNA, 25 bp, probe
ccaacgtgtccctgggcgctaccgg

SEQ ID NO: 2045 - DNA, 25 bp, probe
tccaccttcaaggaggaaccgcaga

SEQ ID NO: 2046 - DNA, 25 bp, probe
ccttcaaggaggaaccgcagaccgt

SEQ ID NO: 2047 - DNA, 25 bp, probe
aaccgcagaccgtgccggaggcgcg

SEQ ID NO: 2048 - DNA, 25 bp, probe
ccccatcaacatggaagaccaagag

SEQ ID NO: 2049 - DNA, 25 bp, probe
aacatggaagaccaagagcgcatca

SEQ ID NO: 2050 - DNA, 25 bp, probe
tgcggaaccggctggcggccaccaa

SEQ ID NO: 2051 - DNA, 25 bp, probe
cggctggcggccaccaagtgccgga

SEQ ID NO: 2052 - DNA, 25 bp, probe
ggtgaagacgctcaaggccgagaac

SEQ ID NO: 2053 - DNA, 25 bp, probe
gaacgcggggctgtcgagtaccgcc

SEQ ID NO: 2054 - DNA, 25 bp, probe
gtcatgacccacgtcagcaacggct

SEQ ID NO: 2055 - DNA, 25 bp, probe
acatctgcaacacagctgtgccctg

SEQ ID NO: 2056 - DNA, 25 bp, probe
gagtggagcccctgtatccgacgga

SEQ ID NO: 2057 - DNA, 25 bp, probe
gtggagcccctgtatccgacggaac

SEQ ID NO: 2058 - DNA, 25 bp, probe
gtatccgacggaacatgaagtccat

SEQ ID NO: 2059 - DNA, 25 bp, probe
tgaagtccatcagctgtcaagaaat

SEQ ID NO: 2060 - DNA, 25 bp, probe
tcagctgtcaagaaatcccgggcca

SEQ ID NO: 2061 - DNA, 25 bp, probe
gggccgcaagtttgacggacatcga

SEQ ID NO: 2062 - DNA, 25 bp, probe
aagtttgacggacatcgatgtgccg

SEQ ID NO: 2063 - DNA, 25 bp, probe
gtgccgggcaacagcaggatatccg

SEQ ID NO: 2064 - DNA, 25 bp, probe
atcatggtcagagtggagtacctgg

SEQ ID NO: 2065 - DNA, 25 bp, probe
gcccaccgtttccatggtcgaaggt

SEQ ID NO: 2066 - DNA, 25 bp, probe
tttccatggtcgaaggtcagggcga

SEQ ID NO: 2067 - DNA, 25 bp, probe
gaccatgtctacacgtgcctgcttg

SEQ ID NO: 2068 - DNA, 25 bp, probe
ctacacgtgcctgcttgcaaagacc

SEQ ID NO: 2069 - DNA, 25 bp, probe
cctgcttgcaaagaccctgaggaag

SEQ ID NO: 2070 - DNA, 25 bp, probe
aagaccctgaggaagaggaactcta

SEQ ID NO: 2071 - DNA, 25 bp, probe
tctggactccccaaggcaggtggcc

SEQ ID NO: 2072 - DNA, 25 bp, probe
ctggactccccaaggcaggtggcct

SEQ ID NO: 2073 - DNA, 25 bp, probe
cgagatgcagcctcagaaggaacaa

SEQ ID NO: 2074 - DNA, 25 bp, probe
agcctcagaaggaacaaggccccca

SEQ ID NO: 2075 - DNA, 25 bp, probe
tggtgccgggtcttcacccagacca

SEQ ID NO: 2076 - DNA, 25 bp, probe
gggtcttcacccagaccacgctggg

SEQ ID NO: 2077 - DNA, 25 bp, probe
gaccacgctgggtcccctctgttgg

SEQ ID NO: 2078 - DNA, 25 bp, probe
tgcacgcgctcaagccaccagggtg

SEQ ID NO: 2079 - DNA, 25 bp, probe
accagggtgcgagatgccagctctg

SEQ ID NO: 2080 - DNA, 25 bp, probe
gtgcgagatgccagctctggagttc

SEQ ID NO: 2081 - DNA, 25 bp, probe
tgcgagatgccagctctggagttct

SEQ ID NO: 2082 - DNA, 25 bp, probe
atgccagctctggagttctcggttg

SEQ ID NO: 2083 - DNA, 25 bp, probe
agctctggagttctcggttgttgta

SEQ ID NO: 2084 - DNA, 25 bp, probe
ggtacatcacctaccggctggtgca

SEQ ID NO: 2085 - DNA, 25 bp, probe
ctgacagcccctagaggcggacaca

SEQ ID NO: 2086 - DNA, 25 bp, probe
gacagcccctagaggcggacacaca

SEQ ID NO: 2087 - DNA, 25 bp, probe
actgtgatcctggactcgctgtagg

SEQ ID NO: 2088 - DNA, 25 bp, probe
tcatcaacaccgaaagggacgatga

SEQ ID NO: 2089 - DNA, 25 bp, probe
acaccgaaagggacgatgactatgc

SEQ ID NO: 2090 - DNA, 25 bp, probe
tcacccagtcctactgggacaccaa

SEQ ID NO: 2091 - DNA, 25 bp, probe
ctcagggatactcgggcctttctgt

SEQ ID NO: 2092 - DNA, 25 bp, probe
gatactcgggcctttctgtgaaagt

SEQ ID NO: 2093 - DNA, 25 bp, probe
ttgtaaactccaccacagggcctgg

SEQ ID NO: 2094 - DNA, 25 bp, probe
gcaccctgtggcatgaccctcgtca

SEQ ID NO: 2095 - DNA, 25 bp, probe
ctcgtcacataggctggaaagattt

SEQ ID NO: 2096 - DNA, 25 bp, probe
aagatttcaccgcctacagatggcg

SEQ ID NO: 2097 - DNA, 25 bp, probe
gtctcagccacaggccaaagacggg

SEQ ID NO: 2098 - DNA, 25 bp, probe
gccacaggccaaagacgggtttcat

SEQ ID NO: 2099 - DNA, 25 bp, probe
agacgggtttcattagagtggtgat

SEQ ID NO: 2100 - DNA, 25 bp, probe
aaacctatgctggtggtagactagg

SEQ ID NO: 2101 - DNA, 25 bp, probe
atgctggtggtagactagggttgtt

SEQ ID NO: 2102 - DNA, 25 bp, probe
tggtgttcttctctgacctgaaata

SEQ ID NO: 2103 - DNA, 25 bp, probe
cgagccaatagactgaagagaccac

SEQ ID NO: 2104 - DNA, 25 bp, probe
tgaagagaccacagcaattggctcc

SEQ ID NO: 2105 - DNA, 25 bp, probe
attggctcctccatctagagatttt

SEQ ID NO: 2106 - DNA, 25 bp, probe
ggcagtattccatgggatgttaagc

SEQ ID NO: 2107 - DNA, 25 bp, probe
gtttcaaatggactcatggcttaga

SEQ ID NO: 2108 - DNA, 25 bp, probe
ggactcatggcttagaaatctttat

SEQ ID NO: 2109 - DNA, 25 bp, probe
cttagaaatctttattcttagggca

SEQ ID NO: 2110 - DNA, 25 bp, probe
cttagggcagtcagtagtattctaa

SEQ ID NO: 2111 - DNA, 25 bp, probe
tagtattctaaagctttctgacaag

SEQ ID NO: 2112 - DNA, 25 bp, probe
ctttctgacaagataaaggaagtca

SEQ ID NO: 2113 - DNA, 25 bp, probe
aacctcagggacaacatttttggtg

SEQ ID NO: 2114 - DNA, 25 bp, probe
acaacatttttggtgtatttgagcc

SEQ ID NO: 2115 - DNA, 25 bp, probe
catttttggtgtatttgagccctcc

SEQ ID NO: 2116 - DNA, 25 bp, probe
cctcccagcaagtttcaccttgggt

SEQ ID NO: 2117 - DNA, 25 bp, probe
gcaagtttcaccttgggtttgtatt

SEQ ID NO: 2118 - DNA, 25 bp, probe
ttacaagaattgtccatgtgcttcc

SEQ ID NO: 2119 - DNA, 25 bp, probe
gcttagaggaacttgcctgtgagcg

SEQ ID NO: 2120 - DNA, 25 bp, probe
cttagaggaacttgcctgtgagcgc

SEQ ID NO: 2121 - DNA, 25 bp, probe
aggaacttgcctgtgagcgctggtc

SEQ ID NO: 2122 - DNA, 25 bp, probe
ggaacttgcctgtgagcgctggtct

SEQ ID NO: 2123 - DNA, 25 bp, probe
cctgtgagcgctggtctttgtgttt

SEQ ID NO: 2124 - DNA, 25 bp, probe
aaatttccaatgaagatgtcagcat

SEQ ID NO: 2125 - DNA, 25 bp, probe
tttccaatgaagatgtcagcatttt

SEQ ID NO: 2126 - DNA, 25 bp, probe
agatgtcagcattttatgaaaaacc

SEQ ID NO: 2127 - DNA, 25 bp, probe
gatgtcagcattttatgaaaaacca

SEQ ID NO: 2128 - DNA, 25 bp, probe
ctctaccagatttgaacatctagtg

SEQ ID NO: 2129 - DNA, 25 bp, probe
gatttgaacatctagtgaggttcac

SEQ ID NO: 2130 - DNA, 25 bp, probe
atttgaacatctagtgaggttcaca

SEQ ID NO: 2131 - DNA, 25 bp, probe
acatctagtgaggttcacattcata

SEQ ID NO: 2132 - DNA, 25 bp, probe
tagtgaggttcacattcatactaag

SEQ ID NO: 2133 - DNA, 25 bp, probe
gtgaggttcacattcatactaagtt

SEQ ID NO: 2134 - DNA, 25 bp, probe
gaggttcacattcatactaagtttt

SEQ ID NO: 2135 - DNA, 25 bp, probe
agagccagtaccaacagcagccatg

SEQ ID NO: 2136 - DNA, 25 bp, probe
gagccagtaccaacagcagccatga

SEQ ID NO: 2137 - DNA, 25 bp, probe
agccagtaccaacagcagccatgat

SEQ ID NO: 2138 - DNA, 25 bp, probe
agtaccaacagcagccatgataggg

SEQ ID NO: 2139 - DNA, 25 bp, probe
ccaacagcagccatgatagggagga

SEQ ID NO: 2140 - DNA, 25 bp, probe
acagcagccatgatagggaggacca

SEQ ID NO: 2141 - DNA, 25 bp, probe
cagcagccatgatagggaggaccag

SEQ ID NO: 2142 - DNA, 25 bp, probe
tccacaatctgacattctcaggaag

SEQ ID NO: 2143 - DNA, 25 bp, probe
aatctgacattctcaggaagccccc

SEQ ID NO: 2144 - DNA, 25 bp, probe
atctgacattctcaggaagccccca

SEQ ID NO: 2145 - DNA, 25 bp, probe
tctgacattctcaggaagcccccaa

SEQ ID NO: 2146 - DNA, 25 bp, probe
ctgacattctcaggaagcccccaag

SEQ ID NO: 2147 - DNA, 25 bp, probe
acattctcaggaagcccccaagttg

SEQ ID NO: 2148 - DNA, 25 bp, probe
caggaagcccccaagttgatatttc

SEQ ID NO: 2149 - DNA, 25 bp, probe
ggaagcccccaagttgatatttcta

SEQ ID NO: 2150 - DNA, 25 bp, probe
gaagcccccaagttgatatttctat

SEQ ID NO: 2151 - DNA, 25 bp, probe
gcacatatcgcatgatgagctatga

SEQ ID NO: 2152 - DNA, 25 bp, probe
acatatcgcatgatgagctatgaac

SEQ ID NO: 2153 - DNA, 25 bp, probe
atatcgcatgatgagctatgaacca

SEQ ID NO: 2154 - DNA, 25 bp, probe
atcgcatgatgagctatgaaccact

SEQ ID NO: 2155 - DNA, 25 bp, probe
tgatgagctatgaaccactggagca

SEQ ID NO: 2156 - DNA, 25 bp, probe
gatgagctatgaaccactggagcag

SEQ ID NO: 2157 - DNA, 25 bp, probe
tgagctatgaaccactggagcagcc

SEQ ID NO: 2158 - DNA, 25 bp, probe
gagctatgaaccactggagcagccc

SEQ ID NO: 2159 - DNA, 25 bp, probe
ctatgaaccactggagcagcccaca

SEQ ID NO: 2160 - DNA, 25 bp, probe
atgaaccactggagcagcccacact

SEQ ID NO: 2161 - DNA, 25 bp, probe
tgaaccactggagcagcccacactg

SEQ ID NO: 2162 - DNA, 25 bp, probe
gaaccactggagcagcccacactgg

SEQ ID NO: 2163 - DNA, 25 bp, probe
ctggagcagcccacactggcttgat

SEQ ID NO: 2164 - DNA, 25 bp, probe
ggagcagcccacactggcttgatgg

SEQ ID NO: 2165 - DNA, 25 bp, probe
agcagcccacactggcttgatggat

SEQ ID NO: 2166 - DNA, 25 bp, probe
gcccacactggcttgatggatcacc

SEQ ID NO: 2167 - DNA, 25 bp, probe
taaagtgaactgctttttgtctcta

SEQ ID NO: 2168 - DNA, 25 bp, probe
ggcttcactggaaaaatggtgtggc

SEQ ID NO: 2169 - DNA, 25 bp, probe
aaatggtgtggctagcatttccctt

SEQ ID NO: 2170 - DNA, 25 bp, probe
catgatgacagatggtgtgaaaacc

SEQ ID NO: 2171 - DNA, 25 bp, probe
gtgtgaaaaccatctaagtttgctt

SEQ ID NO: 2172 - DNA, 25 bp, probe
tgaaaaccatctaagtttgcttttg

SEQ ID NO: 2173 - DNA, 25 bp, probe
atccatttagcaatccaggcctctg

SEQ ID NO: 2174 - DNA, 25 bp, probe
caggcctctgttgaaaagataatat

SEQ ID NO: 2175 - DNA, 25 bp, probe
gaagggaacacatttccttctgaac

SEQ ID NO: 2176 - DNA, 25 bp, probe
gggaacacatttccttctgaactta

SEQ ID NO: 2177 - DNA, 25 bp, probe
aacacttccttggaatatagctgca

SEQ ID NO: 2178 - DNA, 25 bp, probe
ttccttggaatatagctgcattaac

SEQ ID NO: 2179 - DNA, 25 bp, probe
tagctgcattaacttggaaagaagc

SEQ ID NO: 2180 - DNA, 25 bp, probe
agctgcattaacttggaaagaagcc

SEQ ID NO: 2181 - DNA, 25 bp, probe
tggaaagaagcctgttgggccagaa

SEQ ID NO: 2182 - DNA, 25 bp, probe
ccaactggcaaaaaagcaagcatct

SEQ ID NO: 2183 - DNA, 25 bp, probe
gatgcagcagtgacaaatggcattt

SEQ ID NO: 2184 - DNA, 25 bp, probe
aacctggtcccgtttcaccagacat

SEQ ID NO: 2185 - DNA, 25 bp, probe
ggtcccgtttcaccagacatgaatt

SEQ ID NO: 2186 - DNA, 25 bp, probe
ttcaagtggagtcgtcgttctctga

SEQ ID NO: 2187 - DNA, 25 bp, probe
tggagtcgtcgttctctgagagtga

SEQ ID NO: 2188 - DNA, 25 bp, probe
gtcttgacattttcacccaggccct

SEQ ID NO: 2189 - DNA, 25 bp, probe
tgtcatcacatcaccggctgtcact

SEQ ID NO: 2190 - DNA, 25 bp, probe
ggtggccgtaaacgtcctgcgttgc

SEQ ID NO: 2191 - DNA, 25 bp, probe
gtcctgcgttgctatattaggatct

SEQ ID NO: 2192 - DNA, 25 bp, probe
ctatattaggatctctgcagttcag

SEQ ID NO: 2193 - DNA, 25 bp, probe
tatattaggatctctgcagttcagg

SEQ ID NO: 2194 - DNA, 25 bp, probe
gcggcccactacagggctgcagaca

SEQ ID NO: 2195 - DNA, 25 bp, probe
tacagggctgcagacaatcgaggcg

SEQ ID NO: 2196 - DNA, 25 bp, probe
acagggctgcagacaatcgaggcga

SEQ ID NO: 2197 - DNA, 25 bp, probe
aagtttccttttgtgtcattcagtg

SEQ ID NO: 2198 - DNA, 25 bp, probe
tccttttgtgtcattcagtgtaaaa

SEQ ID NO: 2199 - DNA, 25 bp, probe
gaagcgcctcagccaggacgcctat

SEQ ID NO: 2200 - DNA, 25 bp, probe
gcaacagcgtccgttttctgcagca

SEQ ID NO: 2201 - DNA, 25 bp, probe
ccgccaggcgcggccgggaccgcag

SEQ ID NO: 2202 - DNA, 25 bp, probe
gccgggaccgcagagccccgggagc

SEQ ID NO: 2203 - DNA, 25 bp, probe
cagagccccgggagcccgctcgagg

SEQ ID NO: 2204 - DNA, 25 bp, probe
tcgaggaggagcggcagacgcagcg

SEQ ID NO: 2205 - DNA, 25 bp, probe
taaaccgcagccggcggtgcccccg

SEQ ID NO: 2206 - DNA, 25 bp, probe
cgcagccggcggtgcccccgcggcc

SEQ ID NO: 2207 - DNA, 25 bp, probe
cccccgcggccgagcgccgacctca

SEQ ID NO: 2208 - DNA, 25 bp, probe
cctgaaccgctgcagcgagagcacc

SEQ ID NO: 2209 - DNA, 25 bp, probe
gaaccgctgcagcgagagcaccaag

SEQ ID NO: 2210 - DNA, 25 bp, probe
ccccagctagcgtctcggcccttgc

SEQ ID NO: 2211 - DNA, 25 bp, probe
tagcgtctcggcccttgccgccccg

SEQ ID NO: 2212 - DNA, 25 bp, probe
cgtctggacgccgagggcagccccg

SEQ ID NO: 2213 - DNA, 25 bp, probe
acgccgagggcagccccgacccctg

SEQ ID NO: 2214 - DNA, 25 bp, probe
cccgccaccctcaataaatgttgct

SEQ ID NO: 2215 - DNA, 25 bp, probe
aactcacagagatctactcagacag

SEQ ID NO: 2216 - DNA, 25 bp, probe
tcacagagatctactcagacaggac

SEQ ID NO: 2217 - DNA, 25 bp, probe
aggaccttcgcacctttgccagagt

SEQ ID NO: 2218 - DNA, 25 bp, probe
accttcgcacctttgccagagtttg

SEQ ID NO: 2219 - DNA, 25 bp, probe
gcacctttgccagagtttgagcagg

SEQ ID NO: 2220 - DNA, 25 bp, probe
ggtaactgaggactctgatgaagac

SEQ ID NO: 2221 - DNA, 25 bp, probe
gtaactgaggactctgatgaagact

SEQ ID NO: 2222 - DNA, 25 bp, probe
gaagactttatacagccccgcagaa

SEQ ID NO: 2223 - DNA, 25 bp, probe
aaacgcctaaagtcagatgagagac

SEQ ID NO: 2224 - DNA, 25 bp, probe
acgcctaaagtcagatgagagacca

SEQ ID NO: 2225 - DNA, 25 bp, probe
cgcctaaagtcagatgagagaccag

SEQ ID NO: 2226 - DNA, 25 bp, probe
aacagtcagggctcagcagccttgt

SEQ ID NO: 2227 - DNA, 25 bp, probe
ctcatgcacaggtcggcaaggattg

SEQ ID NO: 2228 - DNA, 25 bp, probe
aaatgaagactggtgtgctgtctgc

SEQ ID NO: 2229 - DNA, 25 bp, probe
tccaaggtaccagtgaaataattga

SEQ ID NO: 2230 - DNA, 25 bp, probe
aacagggagcctgttattcttttgg

SEQ ID NO: 2231 - DNA, 25 bp, probe
gggtactcccctgtgctcatgccta

SEQ ID NO: 2232 - DNA, 25 bp, probe
tgcgtggacccctggctcactcaga

SEQ ID NO: 2233 - DNA, 25 bp, probe
tggctcactcagacccggaagacct

SEQ ID NO: 2234 - DNA, 25 bp, probe
tcctggggacgaagaccaagaggaa

SEQ ID NO: 2235 - DNA, 25 bp, probe
ctgcctcagaaaggaccccactttt

SEQ ID NO: 2236 - DNA, 25 bp, probe
tgcctcagaaaggaccccacttttg

SEQ ID NO: 2237 - DNA, 25 bp, probe
gcctcagaaaggaccccacttttgg

SEQ ID NO: 2238 - DNA, 25 bp, probe
acatacacctctggtgacctatttg

SEQ ID NO: 2239 - DNA, 25 bp, probe
cctctggtgacctatttgcacagac

SEQ ID NO: 2240 - DNA, 25 bp, probe
taggggacattccatcccaagcttc

SEQ ID NO: 2241 - DNA, 25 bp, probe
ccacacctatccttttgaggggctt

SEQ ID NO: 2242 - DNA, 25 bp, probe
cacctatccttttgaggggctttgg

SEQ ID NO: 2243 - DNA, 25 bp, probe
agggactgggtcttcacttcttggg

SEQ ID NO: 2244 - DNA, 25 bp, probe
gactgggtcttcacttcttgggcta

SEQ ID NO: 2245 - DNA, 25 bp, probe
gtcttcacttcttgggctaataaaa

SEQ ID NO: 2246 - DNA, 25 bp, probe
atggggacaagctgcgggtactccc

SEQ ID NO: 2247 - DNA, 25 bp, probe
agataaacagtaactcagcgtaagt

SEQ ID NO: 2248 - DNA, 25 bp, probe
cgtaagtgacctgtggatcatcagt

SEQ ID NO: 2249 - DNA, 25 bp, probe
tgacctgtggatcatcagtagtacc

SEQ ID NO: 2250 - DNA, 25 bp, probe
gacctgtggatcatcagtagtaccc

SEQ ID NO: 2251 - DNA, 25 bp, probe
gctttagtttatctcagtcctggat

SEQ ID NO: 2252 - DNA, 25 bp, probe
tagtttatctcagtcctggatggga

SEQ ID NO: 2253 - DNA, 25 bp, probe
atctcagtcctggatgggagagaga

SEQ ID NO: 2254 - DNA, 25 bp, probe
caaagagccctggatcgttgaattg

SEQ ID NO: 2255 - DNA, 25 bp, probe
ccctggatcgttgaattgatagttt

SEQ ID NO: 2256 - DNA, 25 bp, probe
ttgttcctgttcatagatgggaagc

SEQ ID NO: 2257 - DNA, 25 bp, probe
gttcctgttcatagatgggaagctt

SEQ ID NO: 2258 - DNA, 25 bp, probe
agatgggaagcttccttataactga

SEQ ID NO: 2259 - DNA, 25 bp, probe
gaagcttccttataactgatgcaga

SEQ ID NO: 2260 - DNA, 25 bp, probe
tccttataactgatgcagagaaaaa

SEQ ID NO: 2261 - DNA, 25 bp, probe
ccttataactgatgcagagaaaaat

SEQ ID NO: 2262 - DNA, 25 bp, probe
agttatgacatctgtcctaattagt

SEQ ID NO: 2263 - DNA, 25 bp, probe
tgaaccacattgtgcaaaccttctc

SEQ ID NO: 2264 - DNA, 25 bp, probe
gaaccacattgtgcaaaccttctct

SEQ ID NO: 2265 - DNA, 25 bp, probe
accacattgtgcaaaccttctctcc

SEQ ID NO: 2266 - DNA, 25 bp, probe
ccacattgtgcaaaccttctctcct

SEQ ID NO: 2267 - DNA, 25 bp, probe
cacattgtgcaaaccttctctcctg

SEQ ID NO: 2268 - DNA, 25 bp, probe
acattgtgcaaaccttctctcctgt

SEQ ID NO: 2269 - DNA, 25 bp, probe
cattgtgcaaaccttctctcctgtc

SEQ ID NO: 2270 - DNA, 25 bp, probe
attgtgcaaaccttctctcctgtca

SEQ ID NO: 2271 - DNA, 25 bp, probe
ttgtgcaaaccttctctcctgtcaa

SEQ ID NO: 2272 - DNA, 25 bp, probe
gcaaaccttctctcctgtcaacagc

SEQ ID NO: 2273 - DNA, 25 bp, probe
tcaaaattttgaggtcccaaacaga

SEQ ID NO: 2274 - DNA, 25 bp, probe
ttttgaggtcccaaacagaattatc

SEQ ID NO: 2275 - DNA, 25 bp, probe
tttgaggtcccaaacagaattatcg

SEQ ID NO: 2276 - DNA, 25 bp, probe
ttgaggtcccaaacagaattatcga

SEQ ID NO: 2277 - DNA, 25 bp, probe
gaggtcccaaacagaattatcgaaa

SEQ ID NO: 2278 - DNA, 25 bp, probe
ggagataaacttcgactcttctgcc

SEQ ID NO: 2279 - DNA, 25 bp, probe
gagataaacttcgactcttctgcct

SEQ ID NO: 2280 - DNA, 25 bp, probe
gactcttctgccttcaactgagaac

SEQ ID NO: 2281 - DNA, 25 bp, probe
attttgcttttatgacattcacgag

SEQ ID NO: 2282 - DNA, 25 bp, probe
ttttgcttttatgacattcacgagg

SEQ ID NO: 2283 - DNA, 25 bp, probe
tttgcttttatgacattcacgaggc

SEQ ID NO: 2284 - DNA, 25 bp, probe
ttgcttttatgacattcacgaggca

SEQ ID NO: 2285 - DNA, 25 bp, probe
tgcttttatgacattcacgaggcaa

SEQ ID NO: 2286 - DNA, 25 bp, probe
gcttttatgacattcacgaggcaaa

SEQ ID NO: 2287 - DNA, 25 bp, probe
cttttatgacattcacgaggcaaaa

SEQ ID NO: 2288 - DNA, 25 bp, probe
tttatgacattcacgaggcaaaaaa

SEQ ID NO: 2289 - DNA, 25 bp, probe
gaaataactgctctgtccagtgaga

SEQ ID NO: 2290 - DNA, 25 bp, probe
ataactgctctgtccagtgagatag

SEQ ID NO: 2291 - DNA, 25 bp, probe
ctgtccagtgagatagaaagtgagc

SEQ ID NO: 2292 - DNA, 25 bp, probe
aagagagagcctccaggaggaactc

SEQ ID NO: 2293 - DNA, 25 bp, probe
gagcctccaggaggaactcaagagg

SEQ ID NO: 2294 - DNA, 25 bp, probe
aaatccagtacttgactcgtggaga

SEQ ID NO: 2295 - DNA, 25 bp, probe
ctcgtggagaggagtcttcgtccga

SEQ ID NO: 2296 - DNA, 25 bp, probe
gagaggagtcttcgtccgataccaa

SEQ ID NO: 2297 - DNA, 25 bp, probe
gaggagtcttcgtccgataccaata

SEQ ID NO: 2298 - DNA, 25 bp, probe
agtcttcgtccgataccaataagtc

SEQ ID NO: 2299 - DNA, 25 bp, probe
tcttcgtccgataccaataagtcag

SEQ ID NO: 2300 - DNA, 25 bp, probe
cctcttcaagcctggtgaggaaatg

SEQ ID NO: 2301 - DNA, 25 bp, probe
caagcctggtgaggaaatgcttcag

SEQ ID NO: 2302 - DNA, 25 bp, probe
aggaaatgcttcagatgaggctcca

SEQ ID NO: 2303 - DNA, 25 bp, probe
atgcttcagatgaggctccaccttg

SEQ ID NO: 2304 - DNA, 25 bp, probe
ttcagatgaggctccaccttgttaa

SEQ ID NO: 2305 - DNA, 25 bp, probe
tatcaaagtaatccatgtttgtgtc

SEQ ID NO: 2306 - DNA, 25 bp, probe
atcaaagtaatccatgtttgtgtca

SEQ ID NO: 2307 - DNA, 25 bp, probe
tcaaagtaatccatgtttgtgtcaa

SEQ ID NO: 2308 - DNA, 25 bp, probe
caaagtaatccatgtttgtgtcaaa

SEQ ID NO: 2309 - DNA, 25 bp, probe
taatccatgtttgtgtcaaatgatc

SEQ ID NO: 2310 - DNA, 25 bp, probe
aatccatgtttgtgtcaaatgatca

SEQ ID NO: 2311 - DNA, 25 bp, probe
tccatgtttgtgtcaaatgatcata

SEQ ID NO: 2312 - DNA, 25 bp, probe
ttgtcaaaatgcttcttttgttgcc

SEQ ID NO: 2313 - DNA, 25 bp, probe
gtcaaaatgcttcttttgttgccac

SEQ ID NO: 2314 - DNA, 25 bp, probe
aatgcttcttttgttgccacagtaa

SEQ ID NO: 2315 - DNA, 25 bp, probe
atgcttcttttgttgccacagtaaa

SEQ ID NO: 2316 - DNA, 25 bp, probe
tcttttgttgccacagtaaagaaca

SEQ ID NO: 2317 - DNA, 25 bp, probe
ttttgttgccacagtaaagaacagt

SEQ ID NO: 2318 - DNA, 25 bp, probe
tttgttgccacagtaaagaacagtt

SEQ ID NO: 2319 - DNA, 25 bp, probe
tgttgccacagtaaagaacagtttt

SEQ ID NO: 2320 - DNA, 25 bp, probe
ttgccacagtaaagaacagttttta

SEQ ID NO: 2321 - DNA, 25 bp, probe
aaatgatcccgatgggacacttggg

SEQ ID NO: 2322 - DNA, 25 bp, probe
atgtggcagatgtggtcgcattctt

SEQ ID NO: 2323 - DNA, 25 bp, probe
agatgtggtcgcattcttggcatct

SEQ ID NO: 2324 - DNA, 25 bp, probe
gatgtggtcgcattcttggcatctg

SEQ ID NO: 2325 - DNA, 25 bp, probe
cgcattcttggcatctgaagatagt

SEQ ID NO: 2326 - DNA, 25 bp, probe
cttggcatctgaagatagtggatac

SEQ ID NO: 2327 - DNA, 25 bp, probe
atagtggatacatcacagggacctc

SEQ ID NO: 2328 - DNA, 25 bp, probe
acagggacctcagtggaagtcactg

SEQ ID NO: 2329 - DNA, 25 bp, probe
ctcagtggaagtcactggaggtctt

SEQ ID NO: 2330 - DNA, 25 bp, probe
gaggtcttttcatgtaactgcctca

SEQ ID NO: 2331 - DNA, 25 bp, probe
catgtaactgcctcaaggaccctgg

SEQ ID NO: 2332 - DNA, 25 bp, probe
actgcctcaaggaccctggactctg

SEQ ID NO: 2333 - DNA, 25 bp, probe
gcctggcctcctgctgatgaggact

SEQ ID NO: 2334 - DNA, 25 bp, probe
ctggcctcctgctgatgaggactct

SEQ ID NO: 2335 - DNA, 25 bp, probe
tctaagttcccaggatacaaaaggg

SEQ ID NO: 2336 - DNA, 25 bp, probe
gaagcaggggtgcttgtgaccctaa

SEQ ID NO: 2337 - DNA, 25 bp, probe
acaattctgagttttccaattgttg

SEQ ID NO: 2338 - DNA, 25 bp, probe
caattctgagttttccaattgttga

SEQ ID NO: 2339 - DNA, 25 bp, probe
tttccaattgttgaacatggtgtac

SEQ ID NO: 2340 - DNA, 25 bp, probe
ttccaattgttgaacatggtgtact

SEQ ID NO: 2341 - DNA, 25 bp, probe
tccaattgttgaacatggtgtactg

SEQ ID NO: 2342 - DNA, 25 bp, probe
ccaattgttgaacatggtgtactgc

SEQ ID NO: 2343 - DNA, 25 bp, probe
caattgttgaacatggtgtactgcc

SEQ ID NO: 2344 - DNA, 25 bp, probe
attgttgaacatggtgtactgcccc

SEQ ID NO: 2345 - DNA, 25 bp, probe
ttgttgaacatggtgtactgcccca

SEQ ID NO: 2346 - DNA, 25 bp, probe
tgttgaacatggtgtactgccccat

SEQ ID NO: 2347 - DNA, 25 bp, probe
ttgaacatggtgtactgccccattt

SEQ ID NO: 2348 - DNA, 25 bp, probe
tgaacatggtgtactgccccattta

SEQ ID NO: 2349 - DNA, 25 bp, probe
gaacatggtgtactgccccatttat

SEQ ID NO: 2350 - DNA, 25 bp, probe
aacatggtgtactgccccatttatt

SEQ ID NO: 2351 - DNA, 25 bp, probe
tcgccgtctgtgaattggaccatcc

SEQ ID NO: 2352 - DNA, 25 bp, probe
tctgtgaattggaccatcctattta

SEQ ID NO: 2353 - DNA, 25 bp, probe
accatcctatttaactggcttcagc

SEQ ID NO: 2354 - DNA, 25 bp, probe
ccacctctctttttcagttggctga

SEQ ID NO: 2355 - DNA, 25 bp, probe
ctctttttcagttggctgacttcca

SEQ ID NO: 2356 - DNA, 25 bp, probe
acacctagcatctcatgagtgccaa

SEQ ID NO: 2357 - DNA, 25 bp, probe
agcatctcatgagtgccaagcaaaa

SEQ ID NO: 2358 - DNA, 25 bp, probe
tgctgtttccttttatgagacccat

SEQ ID NO: 2359 - DNA, 25 bp, probe
ttatgagacccattcctatttctta

SEQ ID NO: 2360 - DNA, 25 bp, probe
gacccattcctatttcttatagtca

SEQ ID NO: 2361 - DNA, 25 bp, probe
gctagctgcaagtgacatctctttg

SEQ ID NO: 2362 - DNA, 25 bp, probe
tgcaagtgacatctctttgatgtca

SEQ ID NO: 2363 - DNA, 25 bp, probe
attcacaatgaaatgctctcctttc

SEQ ID NO: 2364 - DNA, 25 bp, probe
tttactaatccaacccatgatgagc

SEQ ID NO: 2365 - DNA, 25 bp, probe
gatgagctcctcttcctggcttctt

SEQ ID NO: 2366 - DNA, 25 bp, probe
accctgtaacatgcaattttgcatt

SEQ ID NO: 2367 - DNA, 25 bp, probe
gcccaggacaactgggccaaactac

SEQ ID NO: 2368 - DNA, 25 bp, probe
accaactactatctatggcctgctg

SEQ ID NO: 2369 - DNA, 25 bp, probe
atctatggcctgctgtgcagttagc

SEQ ID NO: 2370 - DNA, 25 bp, probe
ctgctgtgcagttagccaacttcta

SEQ ID NO: 2371 - DNA, 25 bp, probe
tgctgtgcagttagccaacttctac

SEQ ID NO: 2372 - DNA, 25 bp, probe
ccccttcattacaggttggccgttg

SEQ ID NO: 2373 - DNA, 25 bp, probe
tggccgttgtccaatgtgttgctgt

SEQ ID NO: 2374 - DNA, 25 bp, probe
ttgtccaatgtgttgctgttatctg

SEQ ID NO: 2375 - DNA, 25 bp, probe
aatgtgttgctgttatctggaactc

SEQ ID NO: 2376 - DNA, 25 bp, probe
ttgggttgccggtcagagcttaaga

SEQ ID NO: 2377 - DNA, 25 bp, probe
cttaagaggactagcaccctgcaat

SEQ ID NO: 2378 - DNA, 25 bp, probe
aagaggactagcaccctgcaatgcc

SEQ ID NO: 2379 - DNA, 25 bp, probe
atttgttactctaaccctgcctagg

SEQ ID NO: 2380 - DNA, 25 bp, probe
tgcctaggcttcttgtagctccagc

SEQ ID NO: 2381 - DNA, 25 bp, probe
ttgtagctccagctctttagagact

SEQ ID NO: 2382 - DNA, 25 bp, probe
ggaaccctttatatggtgcctcagt

SEQ ID NO: 2383 - DNA, 25 bp, probe
gtcatgaacaatgtcacctgtactc

SEQ ID NO: 2384 - DNA, 25 bp, probe
ctgtactcggatctatgaaaaagta

SEQ ID NO: 2385 - DNA, 25 bp, probe
aaattccatcatcactttggacagg

SEQ ID NO: 2386 - DNA, 25 bp, probe
aattccatcatcactttggacagga

SEQ ID NO: 2387 - DNA, 25 bp, probe
agaatgaccaagctcagttcaatga

SEQ ID NO: 2388 - DNA, 25 bp, probe
accaagctcagttcaatgagcaaat

SEQ ID NO: 2389 - DNA, 25 bp, probe
gttcaatgagcaaatctccatactg

SEQ ID NO: 2390 - DNA, 25 bp, probe
ttttacatgcagctatttcaaagtg

SEQ ID NO: 2391 - DNA, 25 bp, probe
taggatcatccctttggttaataaa

SEQ ID NO: 2392 - DNA, 25 bp, probe
tattgagatgacactctagcaattt

SEQ ID NO: 2393 - DNA, 25 bp, probe
ttgagatgacactctagcaatttat

SEQ ID NO: 2394 - DNA, 25 bp, probe
tgagatgacactctagcaatttata

SEQ ID NO: 2395 - DNA, 25 bp, probe
atagatagctactcttacaggaaat

SEQ ID NO: 2396 - DNA, 25 bp, probe
gatagctactcttacaggaaatact

SEQ ID NO: 2397 - DNA, 25 bp, probe
gctactcttacaggaaatactgtac

SEQ ID NO: 2398 - DNA, 25 bp, probe
agaccattctcaataaaaggtgact

SEQ ID NO: 2399 - DNA, 25 bp, probe
ctcattgaacatatgcaagaatatg

SEQ ID NO: 2400 - DNA, 25 bp, probe
caaggttcgattttcatttgagcag

SEQ ID NO: 2401 - DNA, 25 bp, probe
ccaccactgaaagagtgactttgac

SEQ ID NO: 2402 - DNA, 25 bp, probe
tgactacagagctggaggcatttgc

SEQ ID NO: 2403 - DNA, 25 bp, probe
ggaagaaacactctgagcaagtccc

SEQ ID NO: 2404 - DNA, 25 bp, probe
gaagaaacactctgagcaagtccca

SEQ ID NO: 2405 - DNA, 25 bp, probe
tgagcaagtcccagatatactacaa

SEQ ID NO: 2406 - DNA, 25 bp, probe
gagcaagtcccagatatactacaac

SEQ ID NO: 2407 - DNA, 25 bp, probe
ttaacatgttgaataccaagaactg

SEQ ID NO: 2408 - DNA, 25 bp, probe
agaactgcccaagtttgaaggacaa

SEQ ID NO: 2409 - DNA, 25 bp, probe
cagccctggtgtggtgtggtttaaa

SEQ ID NO: 2410 - DNA, 25 bp, probe
tctttaccaactacagaagagtttg

SEQ ID NO: 2411 - DNA, 25 bp, probe
taccaactacagaagagtttgagga

SEQ ID NO: 2412 - DNA, 25 bp, probe
ttaagaaagcccacatagagaagga

SEQ ID NO: 2413 - DNA, 25 bp, probe
ggattttatcgctttctgctcttcc

SEQ ID NO: 2414 - DNA, 25 bp, probe
gataatgtttcttggagacatccca

SEQ ID NO: 2415 - DNA, 25 bp, probe
agatctggcattaccagtacctgag

SEQ ID NO: 2416 - DNA, 25 bp, probe
ggcattaccagtacctgagctggcc

SEQ ID NO: 2417 - DNA, 25 bp, probe
gtgtcctcagcttcctggaccagat

SEQ ID NO: 2418 - DNA, 25 bp, probe
tcagcttcctggaccagatcaacca

SEQ ID NO: 2419 - DNA, 25 bp, probe
tcctggaccagatcaaccagcggca

SEQ ID NO: 2420 - DNA, 25 bp, probe
gcatcggccgcacaggcaccatcat

SEQ ID NO: 2421 - DNA, 25 bp, probe
caggcaccatcattgtcatcgacat

SEQ ID NO: 2422 - DNA, 25 bp, probe
tcgacatgctcatggagaacatctc

SEQ ID NO: 2423 - DNA, 25 bp, probe
tgctcatggagaacatctccaccaa

SEQ ID NO: 2424 - DNA, 25 bp, probe
tggagaacatctccaccaagggcct

SEQ ID NO: 2425 - DNA, 25 bp, probe
agggcctggactgtgacattgacat

SEQ ID NO: 2426 - DNA, 25 bp, probe
ttgacatccagaagaccatccagat

SEQ ID NO: 2427 - DNA, 25 bp, probe
agttcatctacgtggccatcgccca

SEQ ID NO: 2428 - DNA, 25 bp, probe
tggccatcgcccagttcattgaaac

SEQ ID NO: 2429 - DNA, 25 bp, probe
tgcagtcgcagaagggccaggagtc

SEQ ID NO: 2430 - DNA, 25 bp, probe
agcggtcagcagacaaggagaagag

SEQ ID NO: 2431 - DNA, 25 bp, probe
cctattaagtacagccgcaagaaag

SEQ ID NO: 2432 - DNA, 25 bp, probe
tcacctgcaacagaagtgcgtacca

SEQ ID NO: 2433 - DNA, 25 bp, probe
cctgcaacagaagtgcgtaccagaa

SEQ ID NO: 2434 - DNA, 25 bp, probe
aacagaagtgcgtaccagaagtatg

SEQ ID NO: 2435 - DNA, 25 bp, probe
cgtaccagaagtatgactcatgcaa

SEQ ID NO: 2436 - DNA, 25 bp, probe
taccagaagtatgactcatgcaaag

SEQ ID NO: 2437 - DNA, 25 bp, probe
gaagtatgactcatgcaaagcattt

SEQ ID NO: 2438 - DNA, 25 bp, probe
gactcatgcaaagcattttaccgta

SEQ ID NO: 2439 - DNA, 25 bp, probe
gcattttaccgtacaaatatcctgg

SEQ ID NO: 2440 - DNA, 25 bp, probe
ccgtacaaatatcctggtgcgatga

SEQ ID NO: 2441 - DNA, 25 bp, probe
gtacaaatatcctggtgcgatgatg

SEQ ID NO: 2442 - DNA, 25 bp, probe
tacaaatatcctggtgcgatgatgg

SEQ ID NO: 2443 - DNA, 25 bp, probe
caaatatcctggtgcgatgatgggc

SEQ ID NO: 2444 - DNA, 25 bp, probe
cgatgatgggcctggcaacattttc

SEQ ID NO: 2445 - DNA, 25 bp, probe
ggcctggcaacattttctactgtac

SEQ ID NO: 2446 - DNA, 25 bp, probe
ggcaacattttctactgtacttttg

SEQ ID NO: 2447 - DNA, 25 bp, probe
tcctgaagccatcaactttggctcc

SEQ ID NO: 2448 - DNA, 25 bp, probe
caaaccctgaagtgatccgagctct

SEQ ID NO: 2449 - DNA, 25 bp, probe
aagtgatccgagctctggagcgtgg

SEQ ID NO: 2450 - DNA, 25 bp, probe
agctctacaacatcatgatgcgctg

SEQ ID NO: 2451 - DNA, 25 bp, probe
atgatgcgctgctggaaaaaccgtc

SEQ ID NO: 2452 - DNA, 25 bp, probe
cttcgaatacatccagagtgtgctg

SEQ ID NO: 2453 - DNA, 25 bp, probe
gagagccagtaccaacagcagccat

SEQ ID NO: 2454 - DNA, 25 bp, probe
agtaccaacagcagccatgataggg

SEQ ID NO: 2455 - DNA, 25 bp, probe
cagcagccatgatagggaggaccag

SEQ ID NO: 2456 - DNA, 25 bp, probe
ctcatctgtccagtgggtaggttgg

SEQ ID NO: 2457 - DNA, 25 bp, probe
actggaaaatctctttttgactctt

SEQ ID NO: 2458 - DNA, 25 bp, probe
atctgacattctcaggaagccccca

SEQ ID NO: 2459 - DNA, 25 bp, probe
aagcccccaagttgatatttctatt

SEQ ID NO: 2460 - DNA, 25 bp, probe
tgatatttctatttcctggaatggt

SEQ ID NO: 2461 - DNA, 25 bp, probe
ctatttcctggaatggttggatttt

SEQ ID NO: 2462 - DNA, 25 bp, probe
tagttacagctgtgatttggaaggg

SEQ ID NO: 2463 - DNA, 25 bp, probe
cgcctaatgtgtttgagcatcactt

SEQ ID NO: 2464 - DNA, 25 bp, probe
gtttgagcatcacttaggagaagtc

SEQ ID NO: 2465 - DNA, 25 bp, probe
taggtcaaacccaagttagttcaat

SEQ ID NO: 2466 - DNA, 25 bp, probe
ggtttgcagatattctctagtcatt

SEQ ID NO: 2467 - DNA, 25 bp, probe
tgcagatattctctagtcatttgtt

SEQ ID NO: 2468 - DNA, 25 bp, probe
gcagatattctctagtcatttgtta

SEQ ID NO: 2469 - DNA, 25 bp, probe
tttcttcgtgatgacatatcacatg

SEQ ID NO: 2470 - DNA, 25 bp, probe
ttcttcgtgatgacatatcacatgt

SEQ ID NO: 2471 - DNA, 25 bp, probe
cgtgatgacatatcacatgtcagcc

SEQ ID NO: 2472 - DNA, 25 bp, probe
tgacatatcacatgtcagccactgt

SEQ ID NO: 2473 - DNA, 25 bp, probe
acatatcacatgtcagccactgtga

SEQ ID NO: 2474 - DNA, 25 bp, probe
catatcacatgtcagccactgtgat

SEQ ID NO: 2475 - DNA, 25 bp, probe
ccactgtgatagaggctgaggaatc

SEQ ID NO: 2476 - DNA, 25 bp, probe
aatgatttcacagtgtgtggtcaac

SEQ ID NO: 2477 - DNA, 25 bp, probe
tgtgtggtcaacatttctcatgttg

SEQ ID NO: 2478 - DNA, 25 bp, probe
acatttctcatgttgaagctttaag

SEQ ID NO: 2479 - DNA, 25 bp, probe
gtggcctactttgaggcctcggcca

SEQ ID NO: 2480 - DNA, 25 bp, probe
tactttgaggcctcggccaaactgc

SEQ ID NO: 2481 - DNA, 25 bp, probe
gaggcctcggccaaactgcgtctca

SEQ ID NO: 2482 - DNA, 25 bp, probe
tgcgtctcaacgtggacgaggcttt

SEQ ID NO: 2483 - DNA, 25 bp, probe
tcaacgtggacgaggcttttgagca

SEQ ID NO: 2484 - DNA, 25 bp, probe
cccagtgcccccaggaagaagggcg

SEQ ID NO: 2485 - DNA, 25 bp, probe
gtagcccaggcaagagagaagcaac

SEQ ID NO: 2486 - DNA, 25 bp, probe
gagaagcaaccaccacaagctctcg

SEQ ID NO: 2487 - DNA, 25 bp, probe
agaagcaaccaccacaagctctcgg

SEQ ID NO: 2488 - DNA, 25 bp, probe
tacttcctggcctcttctgggctac

SEQ ID NO: 2489 - DNA, 25 bp, probe
cctcttctgggctactgccactgtg

SEQ ID NO: 2490 - DNA, 25 bp, probe
gctactgccactgtgtgccttctgc

SEQ ID NO: 2491 - DNA, 25 bp, probe
aggggctccgggtcactgctgtata

SEQ ID NO: 2492 - DNA, 25 bp, probe
ggctccgggtcactgctgtatataa

SEQ ID NO: 2493 - DNA, 25 bp, probe
tccgggtcactgctgtatataactc

SEQ ID NO: 2494 - DNA, 25 bp, probe
ccgggtcactgctgtatataactcc

SEQ ID NO: 2495 - DNA, 25 bp, probe
cttgtagtgagcagtgtatggtctc

SEQ ID NO: 2496 - DNA, 25 bp, probe
gagcagtgtatggtctcttttgttc

SEQ ID NO: 2497 - DNA, 25 bp, probe
ccgtcatttacatgataatctgaag

SEQ ID NO: 2498 - DNA, 25 bp, probe
gtcatttacatgataatctgaagct

SEQ ID NO: 2499 - DNA, 25 bp, probe
tactaagtggtactagggaactaca

SEQ ID NO: 2500 - DNA, 25 bp, probe
atactgtaaagcttaagccattgtt

SEQ ID NO: 2501 - DNA, 25 bp, probe
ctgtaaagcttaagccattgttatc

SEQ ID NO: 2502 - DNA, 25 bp, probe
agccattgttatcactgtcatttag

SEQ ID NO: 2503 - DNA, 25 bp, probe
gccattgttatcactgtcatttagc

SEQ ID NO: 2504 - DNA, 25 bp, probe
gtgcataccaatgaatgttttgtac

SEQ ID NO: 2505 - DNA, 25 bp, probe
gcataccaatgaatgttttgtacca

SEQ ID NO: 2506 - DNA, 25 bp, probe
tcaaagcatcccttaggacccacag

SEQ ID NO: 2507 - DNA, 25 bp, probe
agcatcccttaggacccacagaata

SEQ ID NO: 2508 - DNA, 25 bp, probe
atttttgctttaagacagacaatgc

SEQ ID NO: 2509 - DNA, 25 bp, probe
ctttaagacagacaatgcaaaggta

SEQ ID NO: 2510 - DNA, 25 bp, probe
gaagtctgatgtcttctctgagcac

SEQ ID NO: 2511 - DNA, 25 bp, probe
tttgcagtgactgagaaatgctccg

SEQ ID NO: 2512 - DNA, 25 bp, probe
tgatgacatcatgttgctagacaat

SEQ ID NO: 2513 - DNA, 25 bp, probe
atggccaagaggtctacatgtgggt

SEQ ID NO: 2514 - DNA, 25 bp, probe
cccagactagccaggtggagatcaa

SEQ ID NO: 2515 - DNA, 25 bp, probe
agactagccaggtggagatcaagct

SEQ ID NO: 2516 - DNA, 25 bp, probe
tgaaggcctgccaggtatatatcca

SEQ ID NO: 2517 - DNA, 25 bp, probe
aggtatatatccagcacatgcggtc

SEQ ID NO: 2518 - DNA, 25 bp, probe
cagcacatgcggtccaaggaacatg

SEQ ID NO: 2519 - DNA, 25 bp, probe
agcacatgcggtccaaggaacatga

SEQ ID NO: 2520 - DNA, 25 bp, probe
gaatgtactcaggtgacaccacctg

SEQ ID NO: 2521 - DNA, 25 bp, probe
tgtactcaggtgacaccacctgctc

SEQ ID NO: 2522 - DNA, 25 bp, probe
ccagtagcctcaagcagcaccaatg

SEQ ID NO: 2523 - DNA, 25 bp, probe
cagtagcctcaagcagcaccaatgg

SEQ ID NO: 2524 - DNA, 25 bp, probe
cctcaagcagcaccaatggggatga

SEQ ID NO: 2525 - DNA, 25 bp, probe
actctctccacagtgtgagtgcacg

SEQ ID NO: 2526 - DNA, 25 bp, probe
tcactcttccgctagggataaagca

SEQ ID NO: 2527 - DNA, 25 bp, probe
ggtttacacgctaatcccgattcac

SEQ ID NO: 2528 - DNA, 25 bp, probe
attctcaagccctgcagtcacagct

SEQ ID NO: 2529 - DNA, 25 bp, probe
ttctcaagccctgcagtcacagcta

SEQ ID NO: 2530 - DNA, 25 bp, probe
gatcacagcttcagccaggagctgg

SEQ ID NO: 2531 - DNA, 25 bp, probe
agcttcagccaggagctgggcagaa

SEQ ID NO: 2532 - DNA, 25 bp, probe
aggccaagaggctgttcccaccagg

SEQ ID NO: 2533 - DNA, 25 bp, probe
gccaagaggctgttcccaccaggct

SEQ ID NO: 2534 - DNA, 25 bp, probe
accaggctgctcagggctggtcttt

SEQ ID NO: 2535 - DNA, 25 bp, probe
gctgctcagggctggtcttttagga

SEQ ID NO: 2536 - DNA, 25 bp, probe
tcagggctggtcttttaggaccctt

SEQ ID NO: 2537 - DNA, 25 bp, probe
tcccttgagccctctatggtgtggc

SEQ ID NO: 2538 - DNA, 25 bp, probe
ctatggtgtggcaaagccttcattg

SEQ ID NO: 2539 - DNA, 25 bp, probe
tgtggcaaagccttcattgccttaa

SEQ ID NO: 2540 - DNA, 25 bp, probe
tgccttaactggagccccatcagct

SEQ ID NO: 2541 - DNA, 25 bp, probe
atcagctccagctgctctgtcttct

SEQ ID NO: 2542 - DNA, 25 bp, probe
ctgtcctgacctgtctcaccatgta

SEQ ID NO: 2543 - DNA, 25 bp, probe
atagtatagctttgggccatgtagc

SEQ ID NO: 2544 - DNA, 25 bp, probe
tagctttgggccatgtagcatttta

SEQ ID NO: 2545 - DNA, 25 bp, probe
ggccatgtagcattttaagactcaa

SEQ ID NO: 2546 - DNA, 25 bp, probe
caatatgtgtttccttgaagaattc

SEQ ID NO: 2547 - DNA, 25 bp, probe
cttgtgtatgacagctttccttcac

SEQ ID NO: 2548 - DNA, 25 bp, probe
cacacactatttttgtgggtgtgta

SEQ ID NO: 2549 - DNA, 25 bp, probe
gaaacagactttctgcctgttacat

SEQ ID NO: 2550 - DNA, 25 bp, probe
taaccaattaaagaagccaatggca

SEQ ID NO: 2551 - DNA, 25 bp, probe
accaattaaagaagccaatggcatt

SEQ ID NO: 2552 - DNA, 25 bp, probe
tgtgttttccactagtatatccctg

SEQ ID NO: 2553 - DNA, 25 bp, probe
tgtcctgaaattttagtctattctg

SEQ ID NO: 2554 - DNA, 25 bp, probe
agaagttgtagctctgatgtctagc

SEQ ID NO: 2555 - DNA, 25 bp, probe
gtagctctgatgtctagctgtagtc

SEQ ID NO: 2556 - DNA, 25 bp, probe
ctgatgtctagctgtagtctccttg

SEQ ID NO: 2557 - DNA, 25 bp, probe
tctagctgtagtctccttgatctgc

SEQ ID NO: 2558 - DNA, 25 bp, probe
tgcttttctgggaaagcagttttgc

SEQ ID NO: 2559 - DNA, 25 bp, probe
ctttacattaaacaagggaacactg

SEQ ID NO: 2560 - DNA, 25 bp, probe
attaaacaagggaacactgaatctt

SEQ ID NO: 2561 - DNA, 25 bp, probe
agggaacactgaatctttcaaggga

SEQ ID NO: 2562 - DNA, 25 bp, probe
gggaacactgaatctttcaagggaa

SEQ ID NO: 2563 - DNA, 25 bp, probe
aacactgaatctttcaagggaatta

SEQ ID NO: 2564 - DNA, 25 bp, probe
cactgaatctttcaagggaattaca

SEQ ID NO: 2565 - DNA, 25 bp, probe
actgaatctttcaagggaattacac

SEQ ID NO: 2566 - DNA, 25 bp, probe
atctttcaagggaattacacgtttg

SEQ ID NO: 2567 - DNA, 25 bp, probe
tctttcaagggaattacacgtttgg

SEQ ID NO: 2568 - DNA, 25 bp, probe
agagatttactgctatcccaggatg

SEQ ID NO: 2569 - DNA, 25 bp, probe
agatttactgctatcccaggatgtt

SEQ ID NO: 2570 - DNA, 25 bp, probe
gatttactgctatcccaggatgttc

SEQ ID NO: 2571 - DNA, 25 bp, probe
tactgctatcccaggatgttcggac

SEQ ID NO: 2572 - DNA, 25 bp, probe
caggatgttcggacttggtgcccct

SEQ ID NO: 2573 - DNA, 25 bp, probe
gttcggacttggtgcccctgtgcat

SEQ ID NO: 2574 - DNA, 25 bp, probe
acttggtgcccctgtgcatttggaa

SEQ ID NO: 2575 - DNA, 25 bp, probe
gcagcctgacctcttcaaagatatc

SEQ ID NO: 2576 - DNA, 25 bp, probe
caacatgctattttatcatgacagg

SEQ ID NO: 2577 - DNA, 25 bp, probe
ttgcagactacgaagcctatgtcaa

SEQ ID NO: 2578 - DNA, 25 bp, probe
actacgaagcctatgtcaagtgtca

SEQ ID NO: 2579 - DNA, 25 bp, probe
aagcctatgtcaagtgtcaagataa

SEQ ID NO: 2580 - DNA, 25 bp, probe
cctatgtcaagtgtcaagataaagt

SEQ ID NO: 2581 - DNA, 25 bp, probe
aaagtgagtcagctgtacatgaatc

SEQ ID NO: 2582 - DNA, 25 bp, probe
aagtgagtcagctgtacatgaatcc

SEQ ID NO: 2583 - DNA, 25 bp, probe
gtcagctgtacatgaatccaaaggc

SEQ ID NO: 2584 - DNA, 25 bp, probe
tgtacatgaatccaaaggcctggaa

SEQ ID NO: 2585 - DNA, 25 bp, probe
tggtactcaaaaacatagctgcctc

SEQ ID NO: 2586 - DNA, 25 bp, probe
atatgcccaaaacatctggaacgtg

SEQ ID NO: 2587 - DNA, 25 bp, probe
tatgcccaaaacatctggaacgtgg

SEQ ID NO: 2588 - DNA, 25 bp, probe
atgcccaaaacatctggaacgtgga

SEQ ID NO: 2589 - DNA, 25 bp, probe
tgcccaaaacatctggaacgtggaa

SEQ ID NO: 2590 - DNA, 25 bp, probe
gcccaaaacatctggaacgtggaac

SEQ ID NO: 2591 - DNA, 25 bp, probe
agggttctctgtgtgtgtccccggc

SEQ ID NO: 2592 - DNA, 25 bp, probe
ggttctctgtgtgtgtccccggcac

SEQ ID NO: 2593 - DNA, 25 bp, probe
gttctctgtgtgtgtccccggcacg

SEQ ID NO: 2594 - DNA, 25 bp, probe
ttctctgtgtgtgtccccggcacgt

SEQ ID NO: 2595 - DNA, 25 bp, probe
tctctgtgtgtgtccccggcacgtc

SEQ ID NO: 2596 - DNA, 25 bp, probe
cgcctccgttaacacgatcctgaat

SEQ ID NO: 2597 - DNA, 25 bp, probe
gcctccgttaacacgatcctgaata

SEQ ID NO: 2598 - DNA, 25 bp, probe
aacacgatcctgaataaatcttgag

SEQ ID NO: 2599 - DNA, 25 bp, probe
cacgatcctgaataaatcttgagaa

SEQ ID NO: 2600 - DNA, 25 bp, probe
acgatcctgaataaatcttgagaac

SEQ ID NO: 2601 - DNA, 25 bp, probe
cgatcctgaataaatcttgagaacc

SEQ ID NO: 2602 - DNA, 25 bp, probe
gatcctgaataaatcttgagaaccc

SEQ ID NO: 2603 - DNA, 25 bp, probe
agggcagctccctggcatactggct

SEQ ID NO: 2604 - DNA, 25 bp, probe
gcatactggctgcagcccgtgggca

SEQ ID NO: 2605 - DNA, 25 bp, probe
catactggctgcagcccgtgggcag

SEQ ID NO: 2606 - DNA, 25 bp, probe
gcagctccgggctgtcgtccataga

SEQ ID NO: 2607 - DNA, 25 bp, probe
gtttcttggagacatcccacaatgg

SEQ ID NO: 2608 - DNA, 25 bp, probe
gagacatcccacaatgggctctgtt

SEQ ID NO: 2609 - DNA, 25 bp, probe
caagaatatgcctgttcctgtgatg

SEQ ID NO: 2610 - DNA, 25 bp, probe
gcctgttcctgtgatgtggaggaaa

SEQ ID NO: 2611 - DNA, 25 bp, probe
cgattttcatttgagcagccagatg

SEQ ID NO: 2612 - DNA, 25 bp, probe
tttgagcagccagatggtagagcgc

SEQ ID NO: 2613 - DNA, 25 bp, probe
cagatggtagagcgcagatgcccac

SEQ ID NO: 2614 - DNA, 25 bp, probe
actctgagcaagtcccagatatact

SEQ ID NO: 2615 - DNA, 25 bp, probe
caagtcccagatatactacaactca

SEQ ID NO: 2616 - DNA, 25 bp, probe
gatatactacaactcaatgcaatct

SEQ ID NO: 2617 - DNA, 25 bp, probe
aactcaatgcaatctttaacatgtt

SEQ ID NO: 2618 - DNA, 25 bp, probe
gcaatctttaacatgttgaatacca

SEQ ID NO: 2619 - DNA, 25 bp, probe
tgaataccaagaactgcccaagttt

SEQ ID NO: 2620 - DNA, 25 bp, probe
tctggaaacctatctttaccaacta

SEQ ID NO: 2621 - DNA, 25 bp, probe
tctttaccaactacagaagagtttg

SEQ ID NO: 2622 - DNA, 25 bp, probe
gaaagcccacatagagaaggatttt

SEQ ID NO: 2623 - DNA, 25 bp, probe
gatccaaactgtgttgttcttaaat

SEQ ID NO: 2624 - DNA, 25 bp, probe
tgctctctgaagttctcttaagcct

SEQ ID NO: 2625 - DNA, 25 bp, probe
gaagttctcttaagccttcagttta

SEQ ID NO: 2626 - DNA, 25 bp, probe
ctttgcactttggttacacagaaca

SEQ ID NO: 2627 - DNA, 25 bp, probe
tttgcactttggttacacagaacat

SEQ ID NO: 2628 - DNA, 25 bp, probe
gttacacagaacattggtttccaat

SEQ ID NO: 2629 - DNA, 25 bp, probe
tttgactttagaccttttgaagtct

SEQ ID NO: 2630 - DNA, 25 bp, probe
tgactttagaccttttgaagtctgt

SEQ ID NO: 2631 - DNA, 25 bp, probe
actttagaccttttgaagtctgtat

SEQ ID NO: 2632 - DNA, 25 bp, probe
ctttagaccttttgaagtctgtata

SEQ ID NO: 2633 - DNA, 25 bp, probe
tagaccttttgaagtctgtataaac

SEQ ID NO: 2634 - DNA, 25 bp, probe
agaccttttgaagtctgtataaact

SEQ ID NO: 2635 - DNA, 25 bp, probe
ccttttgaagtctgtataaacttgt

SEQ ID NO: 2636 - DNA, 25 bp, probe
ttacaaaaggcatattctttcatgg

SEQ ID NO: 2637 - DNA, 25 bp, probe
aaaggcatattctttcatggtttct

SEQ ID NO: 2638 - DNA, 25 bp, probe
tctttcatggtttctgcaatgagag

SEQ ID NO: 2639 - DNA, 25 bp, probe
ttcaggactctacctcatatcagtt

SEQ ID NO: 2640 - DNA, 25 bp, probe
actctacctcatatcagtttgctag

SEQ ID NO: 2641 - DNA, 25 bp, probe
cctcatatcagtttgctagcagaaa

SEQ ID NO: 2642 - DNA, 25 bp, probe
aagactgtcagcttccaaacattaa

SEQ ID NO: 2643 - DNA, 25 bp, probe
gtcagcttccaaacattaatgcaat

SEQ ID NO: 2644 - DNA, 25 bp, probe
ttccaaacattaatgcaatggttaa

SEQ ID NO: 2645 - DNA, 25 bp, probe
tggttaacatcttctgtctttataa

SEQ ID NO: 2646 - DNA, 25 bp, probe
acatcttctgtctttataatctact

SEQ ID NO: 2647 - DNA, 25 bp, probe
tttataatctactccttgtaaagac

SEQ ID NO: 2648 - DNA, 25 bp, probe
caatccatctctcaagtagtgtatc

SEQ ID NO: 2649 - DNA, 25 bp, probe
atctctcaagtagtgtatcacagta

SEQ ID NO: 2650 - DNA, 25 bp, probe
gtgtatcacagtagtagcctccagg

SEQ ID NO: 2651 - DNA, 25 bp, probe
ttaagggacaacatccttaagtcaa

SEQ ID NO: 2652 - DNA, 25 bp, probe
gacaacatccttaagtcaaaagaga

SEQ ID NO: 2653 - DNA, 25 bp, probe
agaagaggcaccactaaaagatcgc

SEQ ID NO: 2654 - DNA, 25 bp, probe
ggcaccactaaaagatcgcagtttg

SEQ ID NO: 2655 - DNA, 25 bp, probe
aactgggtagcaggtggctgacttc

SEQ ID NO: 2656 - DNA, 25 bp, probe
catgatcagtactattgtgacatta

SEQ ID NO: 2657 - DNA, 25 bp, probe
ttcttcactgccttttctcggtgtg

SEQ ID NO: 2658 - DNA, 25 bp, probe
gctcaaagcctcaccatgaattgat

SEQ ID NO: 2659 - DNA, 25 bp, probe
gacaattttagatacctgagtgcac

SEQ ID NO: 2660 - DNA, 25 bp, probe
acaattttagatacctgagtgcact

SEQ ID NO: 2661 - DNA, 25 bp, probe
tttagatacctgagtgcactttttc

SEQ ID NO: 2662 - DNA, 25 bp, probe
agtgcactttttcagttagtcctaa

SEQ ID NO: 2663 - DNA, 25 bp, probe
accaagagacatatctggtgtacgt

SEQ ID NO: 2664 - DNA, 25 bp, probe
agacatatctggtgtacgtgttgca

SEQ ID NO: 2665 - DNA, 25 bp, probe
tgtacgtgttgcagtatgaactctg

SEQ ID NO: 2666 - DNA, 25 bp, probe
agtatgaactctggttgcaatccct

SEQ ID NO: 2667 - DNA, 25 bp, probe
tatgaactctggttgcaatccctcc

SEQ ID NO: 2668 - DNA, 25 bp, probe
ccgcacaagtcaaacgctaggaagt

SEQ ID NO: 2669 - DNA, 25 bp, probe
taacttgttgctcatttgttgtaac

SEQ ID NO: 2670 - DNA, 25 bp, probe
gttgctcatttgttgtaactcaata

SEQ ID NO: 2671 - DNA, 25 bp, probe
tccctcgtggtcatcgtctgcgggg

SEQ ID NO: 2672 - DNA, 25 bp, probe
ctgtggcctgggtgcaggttaactt

SEQ ID NO: 2673 - DNA, 25 bp, probe
aggagcccactatgcagaggccaaa

SEQ ID NO: 2674 - DNA, 25 bp, probe
tatgcagaggccaaaggtcggcagc

SEQ ID NO: 2675 - DNA, 25 bp, probe
atgcagaggccaaaggtcggcagcc

SEQ ID NO: 2676 - DNA, 25 bp, probe
ccaaaggtcggcagccagcgaggct

SEQ ID NO: 2677 - DNA, 25 bp, probe
cggcagccagcgaggctatgaattg

SEQ ID NO: 2678 - DNA, 25 bp, probe
agccagcgaggctatgaattggacc

SEQ ID NO: 2679 - DNA, 25 bp, probe
ccagcgaggctatgaattggacctt

SEQ ID NO: 2680 - DNA, 25 bp, probe
ctatgaattggacctttttggtatc

SEQ ID NO: 2681 - DNA, 25 bp, probe
tggacctttttggtatctgtgtgac

SEQ ID NO: 2682 - DNA, 25 bp, probe
gtatctgtgtgactgctctgtgccc

SEQ ID NO: 2683 - DNA, 25 bp, probe
tatctgtgtgactgctctgtgccca

SEQ ID NO: 2684 - DNA, 25 bp, probe
caagtgcccacaagtaacacaccag

SEQ ID NO: 2685 - DNA, 25 bp, probe
ccaggtacccagagcagggtggaca

SEQ ID NO: 2686 - DNA, 25 bp, probe
cagggccaccaaccagggttgagga

SEQ ID NO: 2687 - DNA, 25 bp, probe
gatatgtcacttctgttcctccctg

SEQ ID NO: 2688 - DNA, 25 bp, probe
tgtcacttctgttcctccctgcttg

SEQ ID NO: 2689 - DNA, 25 bp, probe
atctttccgaaatgaccacattgtg

SEQ ID NO: 2690 - DNA, 25 bp, probe
ccacattgtgcttttagtttgtatg

SEQ ID NO: 2691 - DNA, 25 bp, probe
ccttaaacacatctgcaggagctca

SEQ ID NO: 2692 - DNA, 25 bp, probe
ctgcaggagctcacaaaatgggagc

SEQ ID NO: 2693 - DNA, 25 bp, probe
gtgatggacactgatgctctattaa

SEQ ID NO: 2694 - DNA, 25 bp, probe
tgatggacactgatgctctattaag

SEQ ID NO: 2695 - DNA, 25 bp, probe
atggacactgatgctctattaagaa

SEQ ID NO: 2696 - DNA, 25 bp, probe
tggacactgatgctctattaagaag

SEQ ID NO: 2697 - DNA, 25 bp, probe
ggacactgatgctctattaagaagc

SEQ ID NO: 2698 - DNA, 25 bp, probe
cactgatgctctattaagaagcttt

SEQ ID NO: 2699 - DNA, 25 bp, probe
ctgatgctctattaagaagcttttg

SEQ ID NO: 2700 - DNA, 25 bp, probe
ttgtcactgatcgtatttctacttg

SEQ ID NO: 2701 - DNA, 25 bp, probe
tgtcactgatcgtatttctacttgt

SEQ ID NO: 2702 - DNA, 25 bp, probe
gtcactgatcgtatttctacttgtt

SEQ ID NO: 2703 - DNA, 25 bp, probe
gctacttcattgacgctgccacagt

SEQ ID NO: 2704 - DNA, 25 bp, probe
tggagagtacaggtgccagacaaac

SEQ ID NO: 2705 - DNA, 25 bp, probe
tacaggtgccagacaaacctctcca

SEQ ID NO: 2706 - DNA, 25 bp, probe
tcagtgacccggtgcagctagaagt

SEQ ID NO: 2707 - DNA, 25 bp, probe
gaggaagaccctattcacctgaggt

SEQ ID NO: 2708 - DNA, 25 bp, probe
ggtcacatatttacagaatggcaaa

SEQ ID NO: 2709 - DNA, 25 bp, probe
aaatgtgtcttcagagactgtgaac

SEQ ID NO: 2710 - DNA, 25 bp, probe
ggcagtgtcaaccatctcatcattc

SEQ ID NO: 2711 - DNA, 25 bp, probe
caagtctctttctgcttggtgatgg

SEQ ID NO: 2712 - DNA, 25 bp, probe
tggtactcctttttgcagtggacac

SEQ ID NO: 2713 - DNA, 25 bp, probe
acacaggactatatttctctgtgaa

SEQ ID NO: 2714 - DNA, 25 bp, probe
gacaaacatttgaagctcaacaaga

SEQ ID NO: 2715 - DNA, 25 bp, probe
ctcaacaagagactggaaggaccat

SEQ ID NO: 2716 - DNA, 25 bp, probe
gagaaaggaccctcaagacaaatga

SEQ ID NO: 2717 - DNA, 25 bp, probe
gaaaggaccctcaagacaaatgacc

SEQ ID NO: 2718 - DNA, 25 bp, probe
gcagcagcatctctgaacatttctc

SEQ ID NO: 2719 - DNA, 25 bp, probe
aatgcttcattaaactgagtgaaac

SEQ ID NO: 2720 - DNA, 25 bp, probe
tgcttcattaaactgagtgaaactg

SEQ ID NO: 2721 - DNA, 25 bp, probe
ggtatgagaaccacaacatctccat

SEQ ID NO: 2722 - DNA, 25 bp, probe
tacaaatgccacagttgaagacagt

SEQ ID NO: 2723 - DNA, 25 bp, probe
actgtacgggcaaagtgtggcagct

SEQ ID NO: 2724 - DNA, 25 bp, probe
aagtgtggcagctggactatgagtc

SEQ ID NO: 2725 - DNA, 25 bp, probe
agtctgagcccctcaacattactgt

SEQ ID NO: 2726 - DNA, 25 bp, probe
ctccgcgtgagaagtactggctaca

SEQ ID NO: 2727 - DNA, 25 bp, probe
tccgcgtgagaagtactggctacaa

SEQ ID NO: 2728 - DNA, 25 bp, probe
ttatttatctcaactcagcagcagg

SEQ ID NO: 2729 - DNA, 25 bp, probe
tcaactcagcagcaggtcacatttc

SEQ ID NO: 2730 - DNA, 25 bp, probe
aaaggcttcagacttctgaacccac

SEQ ID NO: 2731 - DNA, 25 bp, probe
ggcttcagacttctgaacccacatc

SEQ ID NO: 2732 - DNA, 25 bp, probe
acagcttgcaatatacatagaaacg

SEQ ID NO: 2733 - DNA, 25 bp, probe
tacatagaaacgtctgtgctcaagg

SEQ ID NO: 2734 - DNA, 25 bp, probe
cgtctgtgctcaaggatttatagaa

SEQ ID NO: 2735 - DNA, 25 bp, probe
agaagagacccaaatcattctgaag

SEQ ID NO: 2736 - DNA, 25 bp, probe
acccaaatcattctgaaggctcaac

SEQ ID NO: 2737 - DNA, 25 bp, probe
ggttatacctctcattacccacaca

SEQ ID NO: 2738 - DNA, 25 bp, probe
tcattacccacacacgaaggaaagc

SEQ ID NO: 2739 - DNA, 25 bp, probe
cccacacacgaaggaaagcaggacc

SEQ ID NO: 2740 - DNA, 25 bp, probe
ccttcatcccagtgacctcagctaa

SEQ ID NO: 2741 - DNA, 25 bp, probe
atcccagtgacctcagctaagactg

SEQ ID NO: 2742 - DNA, 25 bp, probe
acctcagctaagactgggtcctttg

SEQ ID NO: 2743 - DNA, 25 bp, probe
gctaagactgggtcctttggagtta

SEQ ID NO: 2744 - DNA, 25 bp, probe
ctgggtcctttggagttactgcagt

SEQ ID NO: 2745 - DNA, 25 bp, probe
tcctttggagttactgcagttactg

SEQ ID NO: 2746 - DNA, 25 bp, probe
gttactgttggagattccaactcta

SEQ ID NO: 2747 - DNA, 25 bp, probe
tggagattccaactctaatgtcaat

SEQ ID NO: 2748 - DNA, 25 bp, probe
actctaatgtcaatcgttccttatc

SEQ ID NO: 2749 - DNA, 25 bp, probe
atgtcaatcgttccttatcaggaga

SEQ ID NO: 2750 - DNA, 25 bp, probe
atcgttccttatcaggagaccaaga

SEQ ID NO: 2751 - DNA, 25 bp, probe
ctgcacacctactagtcaccagaga

SEQ ID NO: 2752 - DNA, 25 bp, probe
gcacacctactagtcaccagagact

SEQ ID NO: 2753 - DNA, 25 bp, probe
acctactagtcaccagagactttag

SEQ ID NO: 2754 - DNA, 25 bp, probe
ctactagtcaccagagactttaggg

SEQ ID NO: 2755 - DNA, 25 bp, probe
ctagtcaccagagactttagggggt

SEQ ID NO: 2756 - DNA, 25 bp, probe
ggtgggattccactcgtgtgtttct

SEQ ID NO: 2757 - DNA, 25 bp, probe
gtgggattccactcgtgtgtttcta

SEQ ID NO: 2758 - DNA, 25 bp, probe
tgggattccactcgtgtgtttctat

SEQ ID NO: 2759 - DNA, 25 bp, probe
ggattccactcgtgtgtttctattt

SEQ ID NO: 2760 - DNA, 25 bp, probe
tcacgtttggtgcttctcagatttc

SEQ ID NO: 2761 - DNA, 25 bp, probe
cacgtttggtgcttctcagatttct

SEQ ID NO: 2762 - DNA, 25 bp, probe
acgtttggtgcttctcagatttctg

SEQ ID NO: 2763 - DNA, 25 bp, probe
cgtttggtgcttctcagatttctga

SEQ ID NO: 2764 - DNA, 25 bp, probe
gtttggtgcttctcagatttctgag

SEQ ID NO: 2765 - DNA, 25 bp, probe
ttctcagatttctgaggaaattgct

SEQ ID NO: 2766 - DNA, 25 bp, probe
tctcagatttctgaggaaattgctt

SEQ ID NO: 2767 - DNA, 25 bp, probe
cgcacgcagccctcggggatcttga

SEQ ID NO: 2768 - DNA, 25 bp, probe
cagccctcggggatcttgatgccca

SEQ ID NO: 2769 - DNA, 25 bp, probe
gccctcggggatcttgatgcccact

SEQ ID NO: 2770 - DNA, 25 bp, probe
cctcggggatcttgatgcccacttg

SEQ ID NO: 2771 - DNA, 25 bp, probe
tcggggatcttgatgcccacttgct

SEQ ID NO: 2772 - DNA, 25 bp, probe
cggggatcttgatgcccacttgctt

SEQ ID NO: 2773 - DNA, 25 bp, probe
cttgatgcccacttgcttcttcctg

SEQ ID NO: 2774 - DNA, 25 bp, probe
tgatgcccacttgcttcttcctgtc

SEQ ID NO: 2775 - DNA, 25 bp, probe
ccacttgcttcttcctgtccttggt

SEQ ID NO: 2776 - DNA, 25 bp, probe
cacttgcttcttcctgtccttggtc

SEQ ID NO: 2777 - DNA, 25 bp, probe
acttgcttcttcctgtccttggtct

SEQ ID NO: 2778 - DNA, 25 bp, probe
tcctccgcggtgacctagggacaca

SEQ ID NO: 2779 - DNA, 25 bp, probe
ctccgcggtgacctagggacacagg

SEQ ID NO: 2780 - DNA, 25 bp, probe
gtgacctagggacacagggccgcat

SEQ ID NO: 2781 - DNA, 25 bp, probe
tgacctagggacacagggccgcatg

SEQ ID NO: 2782 - DNA, 25 bp, probe
acctagggacacagggccgcatgag

SEQ ID NO: 2783 - DNA, 25 bp, probe
acagctcctattctcagctgacctg

SEQ ID NO: 2784 - DNA, 25 bp, probe
tcctgagaggcaaaacctgttgcct

SEQ ID NO: 2785 - DNA, 25 bp, probe
tcctctgcctgagtgtgtctttgta

SEQ ID NO: 2786 - DNA, 25 bp, probe
ctgagtgtgtctttgtaatgtcagc

SEQ ID NO: 2787 - DNA, 25 bp, probe
gtcagctggcatcatacaaagagca

SEQ ID NO: 2788 - DNA, 25 bp, probe
ggcatcatacaaagagcaggagaag

SEQ ID NO: 2789 - DNA, 25 bp, probe
catcatacaaagagcaggagaagca

SEQ ID NO: 2790 - DNA, 25 bp, probe
caaacacccagaactcttttgctgg

SEQ ID NO: 2791 - DNA, 25 bp, probe
aactcttttgctggtcagagattcc

SEQ ID NO: 2792 - DNA, 25 bp, probe
tgctggtcagagattccctgagtgt

SEQ ID NO: 2793 - DNA, 25 bp, probe
agagattccctgagtgtctgtcctc

SEQ ID NO: 2794 - DNA, 25 bp, probe
agattccctgagtgtctgtcctcac

SEQ ID NO: 2795 - DNA, 25 bp, probe
caagcctgctctgtgtctgtgttgt

SEQ ID NO: 2796 - DNA, 25 bp, probe
ctctgtgtctgtgttgtgaagcttg

SEQ ID NO: 2797 - DNA, 25 bp, probe
ctgtgttgtgaagcttgagactctg

SEQ ID NO: 2798 - DNA, 25 bp, probe
ggaagcttgaccttgtgtcttcgtc

SEQ ID NO: 2799 - DNA, 25 bp, probe
cctctcagaacatactgattgggag

SEQ ID NO: 2800 - DNA, 25 bp, probe
tgttcagcagaacctgcacacagga

SEQ ID NO: 2801 - DNA, 25 bp, probe
agaacctgcacacaggacagcggga

SEQ ID NO: 2802 - DNA, 25 bp, probe
ctgctgaggcccagtgcatatgcaa

SEQ ID NO: 2803 - DNA, 25 bp, probe
gcccagtgcatatgcaatgtatagt

SEQ ID NO: 2804 - DNA, 25 bp, probe
tcacattaatctcaaagagattcga

SEQ ID NO: 2805 - DNA, 25 bp, probe
atgacggtaagtgttctcatgaagc

SEQ ID NO: 2806 - DNA, 25 bp, probe
gttctcatgaagcaggaggcccttg

SEQ ID NO: 2807 - DNA, 25 bp, probe
gaggcccttgtcgtgggatggcatt

SEQ ID NO: 2808 - DNA, 25 bp, probe
catttggtctcaggcagcaccacac

SEQ ID NO: 2809 - DNA, 25 bp, probe
tcaggcagcaccacactgggtgcgt

SEQ ID NO: 2810 - DNA, 25 bp, probe
cactgggtgcgtctccagtcatctg

SEQ ID NO: 2811 - DNA, 25 bp, probe
gcgtctccagtcatctgtaagagct

SEQ ID NO: 2812 - DNA, 25 bp, probe
ttgctccagattctgatgcatacgg

SEQ ID NO: 2813 - DNA, 25 bp, probe
gattctgatgcatacggctatattg

SEQ ID NO: 2814 - DNA, 25 bp, probe
tttatgtagtcagttgcattcatta

SEQ ID NO: 2815 - DNA, 25 bp, probe
tgacggcccgcgagcgcttccagaa

SEQ ID NO: 2816 - DNA, 25 bp, probe
gaacctggacaagaaggcgagctcc

SEQ ID NO: 2817 - DNA, 25 bp, probe
aacctggacaagaaggcgagctccg

SEQ ID NO: 2818 - DNA, 25 bp, probe
gcgcgggcctagactcgctgcacaa

SEQ ID NO: 2819 - DNA, 25 bp, probe
gcgggcctagactcgctgcacaaga

SEQ ID NO: 2820 - DNA, 25 bp, probe
cagcgtcagccagatctcggtgctc

SEQ ID NO: 2821 - DNA, 25 bp, probe
aaggccaagtgctcgcagttctgca

SEQ ID NO: 2822 - DNA, 25 bp, probe
aagagcttggagtcagccttgaagg

SEQ ID NO: 2823 - DNA, 25 bp, probe
gtcagccttgaaggacctcaagatc

SEQ ID NO: 2824 - DNA, 25 bp, probe
ggacctcaagatcaaatgacctgtg

SEQ ID NO: 2825 - DNA, 25 bp, probe
tcaagatcaaatgacctgtgaggaa

SEQ ID NO: 2826 - DNA, 25 bp, probe
caagatcaaatgacctgtgaggaat

SEQ ID NO: 2827 - DNA, 25 bp, probe
tttgctgaatgtttctggggtacca

SEQ ID NO: 2828 - DNA, 25 bp, probe
gctgaatgtttctggggtaccaata

SEQ ID NO: 2829 - DNA, 25 bp, probe
cataggggctgctccctcaaaaagg

SEQ ID NO: 2830 - DNA, 25 bp, probe
cagatggggagcttttcttacctat

SEQ ID NO: 2831 - DNA, 25 bp, probe
ggaaagtagcgcatccctgaggctg

SEQ ID NO: 2832 - DNA, 25 bp, probe
gtagcgcatccctgaggctggactc

SEQ ID NO: 2833 - DNA, 25 bp, probe
catccctgaggctggactccagatc

SEQ ID NO: 2834 - DNA, 25 bp, probe
tgaggctggactccagatctgcacc

SEQ ID NO: 2835 - DNA, 25 bp, probe
gggatctgactgcacgtggcttctg

SEQ ID NO: 2836 - DNA, 25 bp, probe
cacgtggcttctgatgaatcttgcg

SEQ ID NO: 2837 - DNA, 25 bp, probe
tcttgcgttttttacaaattggagc

SEQ ID NO: 2838 - DNA, 25 bp, probe
gaccctggggtaaagagtgtcacta

SEQ ID NO: 2839 - DNA, 25 bp, probe
tccttccgcaacacgggcgagatca

SEQ ID NO: 2840 - DNA, 25 bp, probe
tggccggctgtgacttcctcaccat

SEQ ID NO: 2841 - DNA, 25 bp, probe
cctgggagagctgctgcaggacaac

SEQ ID NO: 2842 - DNA, 25 bp, probe
gcggcccaagccagtgacctggaaa

SEQ ID NO: 2843 - DNA, 25 bp, probe
ccaagccagtgacctggaaaaaatc

SEQ ID NO: 2844 - DNA, 25 bp, probe
cctggaaaaaatccacctggatgag

SEQ ID NO: 2845 - DNA, 25 bp, probe
ccacctggatgagaagtctttccgt

SEQ ID NO: 2846 - DNA, 25 bp, probe
gacgggatccgcaagtttgccgctg

SEQ ID NO: 2847 - DNA, 25 bp, probe
agcttagcgttcatccgtgtaaccc

SEQ ID NO: 2848 - DNA, 25 bp, probe
gctcatcactggatgaagattctcc

SEQ ID NO: 2849 - DNA, 25 bp, probe
tggatgaagattctcctgtgctaga

SEQ ID NO: 2850 - DNA, 25 bp, probe
aagattctcctgtgctagatgtgca

SEQ ID NO: 2851 - DNA, 25 bp, probe
ctcctgtgctagatgtgcaaatgca

SEQ ID NO: 2852 - DNA, 25 bp, probe
ctgtgctagatgtgcaaatgcaagc

SEQ ID NO: 2853 - DNA, 25 bp, probe
ctttctatagcagattgtgtaacaa

SEQ ID NO: 2854 - DNA, 25 bp, probe
tgtatgtttacatatcacctcatgg

SEQ ID NO: 2855 - DNA, 25 bp, probe
gtatgtttacatatcacctcatggc

SEQ ID NO: 2856 - DNA, 25 bp, probe
tctaaggttctcataggaaaagtac

SEQ ID NO: 2857 - DNA, 25 bp, probe
ctaaggttctcataggaaaagtaca

SEQ ID NO: 2858 - DNA, 25 bp, probe
aagtacatttaatacagcagtgtca

SEQ ID NO: 2859 - DNA, 25 bp, probe
acagcagtgtcatcagaagataact

SEQ ID NO: 2860 - DNA, 25 bp, probe
tgtcatcagaagataacttgagcac

SEQ ID NO: 2861 - DNA, 25 bp, probe
gataacttgagcaccgtcatggctt

SEQ ID NO: 2862 - DNA, 25 bp, probe
accgtcatggcttaatgtttattcc

SEQ ID NO: 2863 - DNA, 25 bp, probe
cattgtggtgttctcttctcaaggc

SEQ ID NO: 2864 - DNA, 25 bp, probe
ggtgttctcttctcaaggctttgaa

SEQ ID NO: 2865 - DNA, 25 bp, probe
aatctccccttgcactgagattagt

SEQ ID NO: 2866 - DNA, 25 bp, probe
cccttgcactgagattagtcgtcag

SEQ ID NO: 2867 - DNA, 25 bp, probe
cactgagattagtcgtcagatctct

SEQ ID NO: 2868 - DNA, 25 bp, probe
acttatacgacctgatttccttagg

SEQ ID NO: 2869 - DNA, 25 bp, probe
cgggcgtcttactcccgctgcttgt

SEQ ID NO: 2870 - DNA, 25 bp, probe
tcttactcccgctgcttgttctgtc

SEQ ID NO: 2871 - DNA, 25 bp, probe
caaacagtgctcatgcttcaggacc

SEQ ID NO: 2872 - DNA, 25 bp, probe
gtgctcatgcttcaggaccttgttt

SEQ ID NO: 2873 - DNA, 25 bp, probe
atgcttcaggaccttgtttgtcgaa

SEQ ID NO: 2874 - DNA, 25 bp, probe
aagatgttggtttccctttctctgt

SEQ ID NO: 2875 - DNA, 25 bp, probe
aaagctagtctgtcttgaaacttgt

SEQ ID NO: 2876 - DNA, 25 bp, probe
gtctgtcttgaaacttgtttacctt

SEQ ID NO: 2877 - DNA, 25 bp, probe
cagaatctcagtgtttgaaagtact

SEQ ID NO: 2878 - DNA, 25 bp, probe
gtaccattctgtactaaagcacttg

SEQ ID NO: 2879 - DNA, 25 bp, probe
cttggtcagctgcaggttgtaaata

SEQ ID NO: 2880 - DNA, 25 bp, probe
cagctgcaggttgtaaatagtgtac

SEQ ID NO: 2881 - DNA, 25 bp, probe
atagtgtacgatactagcatctggt

SEQ ID NO: 2882 - DNA, 25 bp, probe
gtgtacgatactagcatctggtatt

SEQ ID NO: 2883 - DNA, 25 bp, probe
acgatactagcatctggtattttat

SEQ ID NO: 2884 - DNA, 25 bp, probe
tattttgcagcgagcacatgaggaa

SEQ ID NO: 2885 - DNA, 25 bp, probe
attttgcagcgagcacatgaggaag

SEQ ID NO: 2886 - DNA, 25 bp, probe
cagcgagcacatgaggaagctgagt

SEQ ID NO: 2887 - DNA, 25 bp, probe
gtctggccgactatgccttcaccag

SEQ ID NO: 2888 - DNA, 25 bp, probe
tcctggcgatctgctgcctggcgct

SEQ ID NO: 2889 - DNA, 25 bp, probe
tctcgcggcccgtggacttgcgact

SEQ ID NO: 2890 - DNA, 25 bp, probe
cttgcgactgggagaccacccggag

SEQ ID NO: 2891 - DNA, 25 bp, probe
gcaagttgcagctgctggtggccat

SEQ ID NO: 2892 - DNA, 25 bp, probe
agttgcagctgctggtggccataaa

SEQ ID NO: 2893 - DNA, 25 bp, probe
ctgctggtggccataaacagtactt

SEQ ID NO: 2894 - DNA, 25 bp, probe
ggccataaacagtacttccttgact

SEQ ID NO: 2895 - DNA, 25 bp, probe
ttcactgaccttggactttggcatg

SEQ ID NO: 2896 - DNA, 25 bp, probe
gaccttggactttggcatgattctt

SEQ ID NO: 2897 - DNA, 25 bp, probe
ggactttggcatgattcttagtcat

SEQ ID NO: 2898 - DNA, 25 bp, probe
tagtcatacttgaacttgtctcatt

SEQ ID NO: 2899 - DNA, 25 bp, probe
aacttgtctcattccacctcttctc

SEQ ID NO: 2900 - DNA, 25 bp, probe
tccacctcttctcagagcaactctt

SEQ ID NO: 2901 - DNA, 25 bp, probe
tcttctcagagcaactcttcctttg

SEQ ID NO: 2902 - DNA, 25 bp, probe
cttcagatcatagaccaaaaaagtc

SEQ ID NO: 2903 - DNA, 25 bp, probe
ttcgaggtggtagcagtagattcca

SEQ ID NO: 2904 - DNA, 25 bp, probe
tatcctgggtcagtggcggtgcaaa

SEQ ID NO: 2905 - DNA, 25 bp, probe
gtggcggtgcaaactggtttcctca

SEQ ID NO: 2906 - DNA, 25 bp, probe
ctgtccttctgtgtgcttatgtctc

SEQ ID NO: 2907 - DNA, 25 bp, probe
atgtctcttgtgacaattgttttcc

SEQ ID NO: 2908 - DNA, 25 bp, probe
tgtcttcaactgtggacttctggga

SEQ ID NO: 2909 - DNA, 25 bp, probe
caactgtggacttctgggatttgca

SEQ ID NO: 2910 - DNA, 25 bp, probe
atttgcagattttgcaacgtggtac

SEQ ID NO: 2911 - DNA, 25 bp, probe
ctctatggattctgacagagatttc

SEQ ID NO: 2912 - DNA, 25 bp, probe
ctatggattctgacagagatttctt

SEQ ID NO: 2913 - DNA, 25 bp, probe
tcagtttcattttaacgagtgtaac

SEQ ID NO: 2914 - DNA, 25 bp, probe
cagtttcattttaacgagtgtaact

SEQ ID NO: 2915 - DNA, 25 bp, probe
cacttcctgataaataagaggtgat

SEQ ID NO: 2916 - DNA, 25 bp, probe
atacaacagaaaacactttgagttg

SEQ ID NO: 2917 - DNA, 25 bp, probe
tacaacagaaaacactttgagttga

SEQ ID NO: 2918 - DNA, 25 bp, probe
acaacagaaaacactttgagttgaa

SEQ ID NO: 2919 - DNA, 25 bp, probe
caacagaaaacactttgagttgaaa

SEQ ID NO: 2920 - DNA, 25 bp, probe
aaagtaaacacaagctggctgcttc

SEQ ID NO: 2921 - DNA, 25 bp, probe
agtaaacacaagctggctgcttccc

SEQ ID NO: 2922 - DNA, 25 bp, probe
gtaaacacaagctggctgcttccct

SEQ ID NO: 2923 - DNA, 25 bp, probe
acacaagctggctgcttccctgtgg

SEQ ID NO: 2924 - DNA, 25 bp, probe
cacaagctggctgcttccctgtggc

SEQ ID NO: 2925 - DNA, 25 bp, probe
acaagctggctgcttccctgtggca

SEQ ID NO: 2926 - DNA, 25 bp, probe
caagctggctgcttccctgtggcaa

SEQ ID NO: 2927 - DNA, 25 bp, probe
ctcagctccaggaaagatggggagt

SEQ ID NO: 2928 - DNA, 25 bp, probe
gagaagctcccatccaaatcctact

SEQ ID NO: 2929 - DNA, 25 bp, probe
ctcccatccaaatcctactaggaag

SEQ ID NO: 2930 - DNA, 25 bp, probe
tccaaatcctactaggaagagagtg

SEQ ID NO: 2931 - DNA, 25 bp, probe
tcctactaggaagagagtgggctgc

SEQ ID NO: 2932 - DNA, 25 bp, probe
aatctgtgactcatgtttccctgtt

SEQ ID NO: 2933 - DNA, 25 bp, probe
atgcttgcagtatctctccctgtct

SEQ ID NO: 2934 - DNA, 25 bp, probe
tctctccctgtctgtctgctcacat

SEQ ID NO: 2935 - DNA, 25 bp, probe
cctgtctgtctgctcacataagcat

SEQ ID NO: 2936 - DNA, 25 bp, probe
tgtctgctcacataagcattccgtc

SEQ ID NO: 2937 - DNA, 25 bp, probe
ctcacataagcattccgtccatcta

SEQ ID NO: 2938 - DNA, 25 bp, probe
taagcattccgtccatctaagctca

SEQ ID NO: 2939 - DNA, 25 bp, probe
ttccgtccatctaagctcatcgtgc

SEQ ID NO: 2940 - DNA, 25 bp, probe
ccatctaagctcatcgtgctactgg

SEQ ID NO: 2941 - DNA, 25 bp, probe
aagctcatcgtgctactggtatgtg

SEQ ID NO: 2942 - DNA, 25 bp, probe
ctactggtatgtgtatgtgcagtta

SEQ ID NO: 2943 - DNA, 25 bp, probe
agaactttgataccagtcagtggga

SEQ ID NO: 2944 - DNA, 25 bp, probe
gataccagtcagtgggaagacataa

SEQ ID NO: 2945 - DNA, 25 bp, probe
tggataaactttctttgcctcaaga

SEQ ID NO: 2946 - DNA, 25 bp, probe
tccctggagcttttataagttattt

SEQ ID NO: 2947 - DNA, 25 bp, probe
aatccttctgcttggccttgtcatt

SEQ ID NO: 2948 - DNA, 25 bp, probe
ggccttgtcattgtctttggtccta

SEQ ID NO: 2949 - DNA, 25 bp, probe
cttgtcattgtctttggtcctacca

SEQ ID NO: 2950 - DNA, 25 bp, probe
ctggcaacttggaaaggctgtcttt

SEQ ID NO: 2951 - DNA, 25 bp, probe
acttggaaaggctgtctttcaaact

SEQ ID NO: 2952 - DNA, 25 bp, probe
aaaggctgtctttcaaacttcagtt

SEQ ID NO: 2953 - DNA, 25 bp, probe
aggctgtctttcaaacttcagttcc

SEQ ID NO: 2954 - DNA, 25 bp, probe
ggctgtctttcaaacttcagttcct

SEQ ID NO: 2955 - DNA, 25 bp, probe
agttcctatctgactaaaacagccg

SEQ ID NO: 2956 - DNA, 25 bp, probe
gttcctatctgactaaaacagccga

SEQ ID NO: 2957 - DNA, 25 bp, probe
ggatggcctttaacattgctgaggc

SEQ ID NO: 2958 - DNA, 25 bp, probe
ctgcaacagatgcaggagtttagag

SEQ ID NO: 2959 - DNA, 25 bp, probe
atcctcagctgactgagtctcagaa

SEQ ID NO: 2960 - DNA, 25 bp, probe
ctgagtctcagaatgctcaggacca

SEQ ID NO: 2961 - DNA, 25 bp, probe
ctcagaatgctcaggaccaaggtgc

SEQ ID NO: 2962 - DNA, 25 bp, probe
atgctcaggaccaaggtgcagagat

SEQ ID NO: 2963 - DNA, 25 bp, probe
gccaggagacccagcgatctgagca

SEQ ID NO: 2964 - DNA, 25 bp, probe
cctatcactagtgcatgctgtggcc

SEQ ID NO: 2965 - DNA, 25 bp, probe
gctgtggccagacagatgacacctt

SEQ ID NO: 2966 - DNA, 25 bp, probe
cagatgacaccttttgttatgttga

SEQ ID NO: 2967 - DNA, 25 bp, probe
tgaaattaacttgctaggcaaccct

SEQ ID NO: 2968 - DNA, 25 bp, probe
acttgctaggcaaccctaaattggg

SEQ ID NO: 2969 - DNA, 25 bp, probe
gctaggcaaccctaaattgggaagc

SEQ ID NO: 2970 - DNA, 25 bp, probe
tgtctgctctggtgtgatctgaaaa

SEQ ID NO: 2971 - DNA, 25 bp, probe
ctctggtgtgatctgaaaaggcgtc

SEQ ID NO: 2972 - DNA, 25 bp, probe
ctgaaaaggcgtcttcactgcttta

SEQ ID NO: 2973 - DNA, 25 bp, probe
aggcgtcttcactgctttatctcat

SEQ ID NO: 2974 - DNA, 25 bp, probe
cactgctttatctcatgatgcttgc

SEQ ID NO: 2975 - DNA, 25 bp, probe
tctccttttgatgaaaactgtcact

SEQ ID NO: 2976 - DNA, 25 bp, probe
ctccttttgatgaaaactgtcactt

SEQ ID NO: 2977 - DNA, 25 bp, probe
gaaaactgtcactttagcatgtaat

SEQ ID NO: 2978 - DNA, 25 bp, probe
gtcactttagcatgtaatccattac

SEQ ID NO: 2979 - DNA, 25 bp, probe
ctttagcatgtaatccattacagaa

SEQ ID NO: 2980 - DNA, 25 bp, probe
gcaccatccaggcctggggctcggg

SEQ ID NO: 2981 - DNA, 25 bp, probe
caccatccaggcctggggctcgggc

SEQ ID NO: 2982 - DNA, 25 bp, probe
tcacaggccagggagtcccccaccc

SEQ ID NO: 2983 - DNA, 25 bp, probe
gtggcctcggtccccagcatctcca

SEQ ID NO: 2984 - DNA, 25 bp, probe
atctccacccaaggccgtgcagggg

SEQ ID NO: 2985 - DNA, 25 bp, probe
tgcaggggagcaggtgcctgctttc

SEQ ID NO: 2986 - DNA, 25 bp, probe
caggtgcctgctttccctccccttc

SEQ ID NO: 2987 - DNA, 25 bp, probe
gacccccggggcaggggcagatcca

SEQ ID NO: 2988 - DNA, 25 bp, probe
cggggcaggggcagatccagaattg

SEQ ID NO: 2989 - DNA, 25 bp, probe
agaattgagaaccgcggaagagcag

SEQ ID NO: 2990 - DNA, 25 bp, probe
ttgagaaccgcggaagagcagccac

SEQ ID NO: 2991 - DNA, 25 bp, probe
aactctgctgcatggcagatgccta

SEQ ID NO: 2992 - DNA, 25 bp, probe
gggaaggccctggattctcactcat

SEQ ID NO: 2993 - DNA, 25 bp, probe
gaaggccctggattctcactcatgt

SEQ ID NO: 2994 - DNA, 25 bp, probe
cctggattctcactcatgtgagatc

SEQ ID NO: 2995 - DNA, 25 bp, probe
tcactcatgtgagatcttgaatctc

SEQ ID NO: 2996 - DNA, 25 bp, probe
actcatgtgagatcttgaatctctt

SEQ ID NO: 2997 - DNA, 25 bp, probe
aaactctgtatctgtttctagcatg

SEQ ID NO: 2998 - DNA, 25 bp, probe
tctgtttctagcatgtgctgcattg

SEQ ID NO: 2999 - DNA, 25 bp, probe
tctagcatgtgctgcattgactcta

SEQ ID NO: 3000 - DNA, 25 bp, probe
gtgctgcattgactctattaatcac

SEQ ID NO: 3001 - DNA, 25 bp, probe
cttcactagcctctctgaaggtgtc

SEQ ID NO: 3002 - DNA, 25 bp, probe
tagcctctctgaaggtgtcctggcc

SEQ ID NO: 3003 - DNA, 25 bp, probe
gccctggagaagcactggtgtctgc

SEQ ID NO: 3004 - DNA, 25 bp, probe
gaagcactggtgtctgcagcacccc

SEQ ID NO: 3005 - DNA, 25 bp, probe
aagcactggtgtctgcagcacccct

SEQ ID NO: 3006 - DNA, 25 bp, probe
tgaagatacacactgtaactacaag

SEQ ID NO: 3007 - DNA, 25 bp, probe
gaccttcagttggagctgaactcgg

SEQ ID NO: 3008 - DNA, 25 bp, probe
agttggagctgaactcggaatccga

SEQ ID NO: 3009 - DNA, 25 bp, probe
ttggagctgaactcggaatccgaag

SEQ ID NO: 3010 - DNA, 25 bp, probe
tcagcaccctcaacggcgagatcag

SEQ ID NO: 3011 - DNA, 25 bp, probe
caacggcgagatcagcgccctgacg

SEQ ID NO: 3012 - DNA, 25 bp, probe
aacggcgagatcagcgccctgacgg

SEQ ID NO: 3013 - DNA, 25 bp, probe
gcggcatgcgttcctgcggacgatc

SEQ ID NO: 3014 - DNA, 25 bp, probe
ttcctgcggacgatcgcatcttgtg

SEQ ID NO: 3015 - DNA, 25 bp, probe
cggacgatcgcatcttgtgtcgctg

SEQ ID NO: 3016 - DNA, 25 bp, probe
tcgcatcttgtgtcgctgaagcgcc

SEQ ID NO: 3017 - DNA, 25 bp, probe
catccagggggcaagaggaattacg

SEQ ID NO: 3018 - DNA, 25 bp, probe
ggaattacgtgctctgtgggtctcc

SEQ ID NO: 3019 - DNA, 25 bp, probe
aattacgtgctctgtgggtctcccc

SEQ ID NO: 3020 - DNA, 25 bp, probe
cgcctcgccggatctgagggagaac

SEQ ID NO: 3021 - DNA, 25 bp, probe
tcgccggatctgagggagaacaaga

SEQ ID NO: 3022 - DNA, 25 bp, probe
agaacaagaccgatcggcggccact

SEQ ID NO: 3023 - DNA, 25 bp, probe
ctatgggcagtatgatctgtggctg

SEQ ID NO: 3024 - DNA, 25 bp, probe
gactcggctctcaggaaatatgttc

SEQ ID NO: 3025 - DNA, 25 bp, probe
ctccacgggtagtgggaacacttat

SEQ ID NO: 3026 - DNA, 25 bp, probe
agtgggaacacttatgcctacgggg

SEQ ID NO: 3027 - DNA, 25 bp, probe
acacttatgcctacggggtcatgga

SEQ ID NO: 3028 - DNA, 25 bp, probe
gaccttggccgcagggctattgctt

SEQ ID NO: 3029 - DNA, 25 bp, probe
tgcttatgccactcacagagacagc

SEQ ID NO: 3030 - DNA, 25 bp, probe
tcacagagacagctattctggaggc

SEQ ID NO: 3031 - DNA, 25 bp, probe
tctggaggcgttgtcaatatgtacc

SEQ ID NO: 3032 - DNA, 25 bp, probe
cgttgtcaatatgtaccacatgaag

SEQ ID NO: 3033 - DNA, 25 bp, probe
tcaatatgtaccacatgaaggaaga

SEQ ID NO: 3034 - DNA, 25 bp, probe
caatatgtaccacatgaaggaagat

SEQ ID NO: 3035 - DNA, 25 bp, probe
tacagatgtcagtgacctgctgcac

SEQ ID NO: 3036 - DNA, 25 bp, probe
cagtgacctgctgcaccagtaccgg

SEQ ID NO: 3037 - DNA, 25 bp, probe
accgggaagccaatcaataatggtg

SEQ ID NO: 3038 - DNA, 25 bp, probe
gtctcctctgggaggtcttggccga

SEQ ID NO: 3039 - DNA, 25 bp, probe
tacaaggagacatctgtggtttccc

SEQ ID NO: 3040 - DNA, 25 bp, probe
tgaatgtaacactgtggacattgac

SEQ ID NO: 3041 - DNA, 25 bp, probe
atgtaacactgtggacattgacttc

SEQ ID NO: 3042 - DNA, 25 bp, probe
taacactgtggacattgacttcccg

SEQ ID NO: 3043 - DNA, 25 bp, probe
cactgtggacattgacttcccgcat

SEQ ID NO: 3044 - DNA, 25 bp, probe
gtggacattgacttcccgcataagg

SEQ ID NO: 3045 - DNA, 25 bp, probe
cacagtatcttatgtgttgttttcc

SEQ ID NO: 3046 - DNA, 25 bp, probe
tgttgttttccgttgtgacgaatgt

SEQ ID NO: 3047 - DNA, 25 bp, probe
ttccgttgtgacgaatgtgattgga

SEQ ID NO: 3048 - DNA, 25 bp, probe
tgtgattggaacatttggggagcac

SEQ ID NO: 3049 - DNA, 25 bp, probe
catttggggagcacccagagggatt

SEQ ID NO: 3050 - DNA, 25 bp, probe
gaagcattacactttgctaaatcat

SEQ ID NO: 3051 - DNA, 25 bp, probe
cattacactttgctaaatcatgtat

SEQ ID NO: 3052 - DNA, 25 bp, probe
tacactttgctaaatcatgtattta

SEQ ID NO: 3053 - DNA, 25 bp, probe
actttgctaaatcatgtatttattc

SEQ ID NO: 3054 - DNA, 25 bp, probe
aatcatgtatttattcctgattaaa

SEQ ID NO: 3055 - DNA, 25 bp, probe
tgcaggtggccgagggcttcatctc

SEQ ID NO: 3056 - DNA, 25 bp, probe
gccgagggcttcatctcgcgcatgc

SEQ ID NO: 3057 - DNA, 25 bp, probe
gccccgaacactcaggtggagattc

SEQ ID NO: 3058 - DNA, 25 bp, probe
ttcaagcaatttttcaaggactgga

SEQ ID NO: 3059 - DNA, 25 bp, probe
acctgcctgcttgcttctctggctg

SEQ ID NO: 3060 - DNA, 25 bp, probe
gcctgcttgcttctctggctgcctg

SEQ ID NO: 3061 - DNA, 25 bp, probe
ctgcctggtcagtgcagaggtgccc

SEQ ID NO: 3062 - DNA, 25 bp, probe
accctgaggaagacctcacagctga

SEQ ID NO: 3063 - DNA, 25 bp, probe
cctgaggaagacctcacagctgaca

SEQ ID NO: 3064 - DNA, 25 bp, probe
ctgtataaggtctctgatgccactg

SEQ ID NO: 3065 - DNA, 25 bp, probe
tgtataaggtctctgatgccactgg

SEQ ID NO: 3066 - DNA, 25 bp, probe
atgaacctgaccaaggtggctgact

SEQ ID NO: 3067 - DNA, 25 bp, probe
gcccttgaactgctgatatctgatg

SEQ ID NO: 3068 - DNA, 25 bp, probe
tgaactgctgatatctgatgactgc

SEQ ID NO: 3069 - DNA, 25 bp, probe
gggctctgtggcaagatctatatct

SEQ ID NO: 3070 - DNA, 25 bp, probe
ctctgtggcaagatctatatctgga

SEQ ID NO: 3071 - DNA, 25 bp, probe
ccttttgtctgaacgccagagctac

SEQ ID NO: 3072 - DNA, 25 bp, probe
tgtctgaacgccagagctactgacc

SEQ ID NO: 3073 - DNA, 25 bp, probe
cgccagagctactgaccaggtcggg

SEQ ID NO: 3074 - DNA, 25 bp, probe
cagccccaggtggaaggctcagttg

SEQ ID NO: 3075 - DNA, 25 bp, probe
gccccaggtggaaggctcagttgtc

SEQ ID NO: 3076 - DNA, 25 bp, probe
tggaaggctcagttgtcggaaagac

SEQ ID NO: 3077 - DNA, 25 bp, probe
ctcagttgtcggaaagacaaaagcg

SEQ ID NO: 3078 - DNA, 25 bp, probe
tgaggtatgcatttcccagaaccgt

SEQ ID NO: 3079 - DNA, 25 bp, probe
gcatttcccagaaccgtgggcgtac

SEQ ID NO: 3080 - DNA, 25 bp, probe
gggggaccacctctccttgcattca

SEQ ID NO: 3081 - DNA, 25 bp, probe
cacctctccttgcattcaggggctg

SEQ ID NO: 3082 - DNA, 25 bp, probe
ctccttgcattcaggggctgtgaag

SEQ ID NO: 3083 - DNA, 25 bp, probe
cattcaggggctgtgaagctgagta

SEQ ID NO: 3084 - DNA, 25 bp, probe
tggtttgggtcatcagaggactgcc

SEQ ID NO: 3085 - DNA, 25 bp, probe
tttgggtcatcagaggactgcctgg

SEQ ID NO: 3086 - DNA, 25 bp, probe
tttcagcctggaatcagacatcttc

SEQ ID NO: 3087 - DNA, 25 bp, probe
gacccactggttccttcttcctggg

SEQ ID NO: 3088 - DNA, 25 bp, probe
ctggttccttcttcctgggtcttca

SEQ ID NO: 3089 - DNA, 25 bp, probe
gttccttcttcctgggtcttcagca

SEQ ID NO: 3090 - DNA, 25 bp, probe
tcttcctgggtcttcagcattccct

SEQ ID NO: 3091 - DNA, 25 bp, probe
gccataggagtcctaagtgtcaccc

SEQ ID NO: 3092 - DNA, 25 bp, probe
accccgctgtaagctcctttgtgga

SEQ ID NO: 3093 - DNA, 25 bp, probe
taagctcctttgtggagtgctgggt

SEQ ID NO: 3094 - DNA, 25 bp, probe
tggagtgctgggtaagcagtttcca

SEQ ID NO: 3095 - DNA, 25 bp, probe
aagcagtttccaataaacgcaagct

SEQ ID NO: 3096 - DNA, 25 bp, probe
gtgaagctccttccagacgatgaaa

SEQ ID NO: 3097 - DNA, 25 bp, probe
acacgccggaaaagcgagccgagaa

SEQ ID NO: 3098 - DNA, 25 bp, probe
gcgactgatccagtttgagcctcaa

SEQ ID NO: 3099 - DNA, 25 bp, probe
agctccctgccaaactgaagcatct

SEQ ID NO: 3100 - DNA, 25 bp, probe
tgaagcatctgtagtgacccactgg

SEQ ID NO: 3101 - DNA, 25 bp, probe
agcatctgtagtgacccactggttc

SEQ ID NO: 3102 - DNA, 25 bp, probe
ctgtagtgacccactggttccttct

SEQ ID NO: 3103 - DNA, 25 bp, probe
gtatcattgacacttcctgcagggt

SEQ ID NO: 3104 - DNA, 25 bp, probe
tgacacttcctgcagggtggtccct

SEQ ID NO: 3105 - DNA, 25 bp, probe
cagcagctttctagggacagctgga

SEQ ID NO: 3106 - DNA, 25 bp, probe
tgactatttcttacgagggttctac

SEQ ID NO: 3107 - DNA, 25 bp, probe
tcttacgagggttctacttatttat

SEQ ID NO: 3108 - DNA, 25 bp, probe
cttacgagggttctacttatttatg

SEQ ID NO: 3109 - DNA, 25 bp, probe
tgtgtttcatcaaacatagctcagt

SEQ ID NO: 3110 - DNA, 25 bp, probe
gtgtttcatcaaacatagctcagtc

SEQ ID NO: 3111 - DNA, 25 bp, probe
gtcagccaccttgataaatgacagg

SEQ ID NO: 3112 - DNA, 25 bp, probe
tcagccaccttgataaatgacaggg

SEQ ID NO: 3113 - DNA, 25 bp, probe
agccaccttgataaatgacagggtg

SEQ ID NO: 3114 - DNA, 25 bp, probe
atttttatgctgaagtttcccttag

SEQ ID NO: 3115 - DNA, 25 bp, probe
ttatgctgaagtttcccttagacat

SEQ ID NO: 3116 - DNA, 25 bp, probe
tatgctgaagtttcccttagacatt

SEQ ID NO: 3117 - DNA, 25 bp, probe
ttaatgtccattctgcagcgtttct

SEQ ID NO: 3118 - DNA, 25 bp, probe
taatgtccattctgcagcgtttctc

SEQ ID NO: 3119 - DNA, 25 bp, probe
ctctcagaacatactgattgggagg

SEQ ID NO: 3120 - DNA, 25 bp, probe
tgcgtgttcagcagaacctgcacac

SEQ ID NO: 3121 - DNA, 25 bp, probe
gaacctgcacacaggacagcgggaa

SEQ ID NO: 3122 - DNA, 25 bp, probe
tgctgaggcccagtgcatatgcaat

SEQ ID NO: 3123 - DNA, 25 bp, probe
aggcccagtgcatatgcaatgtata

SEQ ID NO: 3124 - DNA, 25 bp, probe
cccagtgcatatgcaatgtatagtg

SEQ ID NO: 3125 - DNA, 25 bp, probe
tgacggtaagtgttctcatgaagca

SEQ ID NO: 3126 - DNA, 25 bp, probe
aggcccttgtcgtgggatggcattt

SEQ ID NO: 3127 - DNA, 25 bp, probe
ggatggcatttggtctcaggcagca

SEQ ID NO: 3128 - DNA, 25 bp, probe
ttggtctcaggcagcaccacactgg

SEQ ID NO: 3129 - DNA, 25 bp, probe
caggcagcaccacactgggtgcgtc

SEQ ID NO: 3130 - DNA, 25 bp, probe
cactgggtgcgtctccagtcatctg

SEQ ID NO: 3131 - DNA, 25 bp, probe
gcgtctccagtcatctgtaagagct

SEQ ID NO: 3132 - DNA, 25 bp, probe
gtcatctgtaagagcttgctccaga

SEQ ID NO: 3133 - DNA, 25 bp, probe
atctgtaagagcttgctccagattc

SEQ ID NO: 3134 - DNA, 25 bp, probe
ttgctccagattctgatgcatacgg

SEQ ID NO: 3135 - DNA, 25 bp, probe
cagaaatttccagagcattatgtag

SEQ ID NO: 3136 - DNA, 25 bp, probe
aaatgcaagcaagctgttaaagatc

SEQ ID NO: 3137 - DNA, 25 bp, probe
gttaaagatcttggatcccattata

SEQ ID NO: 3138 - DNA, 25 bp, probe
tcccattatatagtatgtatagctg

SEQ ID NO: 3139 - DNA, 25 bp, probe
aatagacttacttgcactttgaaga

SEQ ID NO: 3140 - DNA, 25 bp, probe
tacttgcactttgaagatgagttac

SEQ ID NO: 3141 - DNA, 25 bp, probe
gatgagttactccttgtcatcttac

SEQ ID NO: 3142 - DNA, 25 bp, probe
tcataacagatgtcagttttgaacc

SEQ ID NO: 3143 - DNA, 25 bp, probe
ataacagatgtcagttttgaaccaa

SEQ ID NO: 3144 - DNA, 25 bp, probe
aaactggcttcatttctgtgaaatt

SEQ ID NO: 3145 - DNA, 25 bp, probe
aactggcttcatttctgtgaaattg

SEQ ID NO: 3146 - DNA, 25 bp, probe
catttctgtgaaattgctctttgaa

SEQ ID NO: 3147 - DNA, 25 bp, probe
tctttttacacgtgtaagccaactg

SEQ ID NO: 3148 - DNA, 25 bp, probe
ttttacacgtgtaagccaactgaga

SEQ ID NO: 3149 - DNA, 25 bp, probe
acgtgtaagccaactgagataccgt

SEQ ID NO: 3150 - DNA, 25 bp, probe
aagccaactgagataccgtgatggt

SEQ ID NO: 3151 - DNA, 25 bp, probe
agcagagcaactctccaacacactg

SEQ ID NO: 3152 - DNA, 25 bp, probe
aattgcagccagtgagaaatttaca

SEQ ID NO: 3153 - DNA, 25 bp, probe
ttgcagccagtgagaaatttacaaa

SEQ ID NO: 3154 - DNA, 25 bp, probe
ttctacatggattttgccttccatg

SEQ ID NO: 3155 - DNA, 25 bp, probe
ccttccatgaaatcatacaggagtg

SEQ ID NO: 3156 - DNA, 25 bp, probe
tccatgaaatcatacaggagtggca

SEQ ID NO: 3157 - DNA, 25 bp, probe
cctggcagctcatcgagcccgtgga

SEQ ID NO: 3158 - DNA, 25 bp, probe
tcatcgagcccgtggatggattcca

SEQ ID NO: 3159 - DNA, 25 bp, probe
tcgagcccgtggatggattccaccc

SEQ ID NO: 3160 - DNA, 25 bp, probe
actcattccacaaaccctatggggg

SEQ ID NO: 3161 - DNA, 25 bp, probe
ggggctgccacgtcacaggcccaaa

SEQ ID NO: 3162 - DNA, 25 bp, probe
cacaggcccaaaggactcttcttca

SEQ ID NO: 3163 - DNA, 25 bp, probe
gagcatatctggacgactgtgcaat

SEQ ID NO: 3164 - DNA, 25 bp, probe
gtgcaatgctgtgtgctcccgggat

SEQ ID NO: 3165 - DNA, 25 bp, probe
gtgctcccgggatcagtaacccttc

SEQ ID NO: 3166 - DNA, 25 bp, probe
ataacctttcataaagtgctttggg

SEQ ID NO: 3167 - DNA, 25 bp, probe
ccgctgcctttctttcctcagttgg

SEQ ID NO: 3168 - DNA, 25 bp, probe
cgctgcctttctttcctcagttgga

SEQ ID NO: 3169 - DNA, 25 bp, probe
gctgcctttctttcctcagttggag

SEQ ID NO: 3170 - DNA, 25 bp, probe
ctgcctttctttcctcagttggagc

SEQ ID NO: 3171 - DNA, 25 bp, probe
tgcctttctttcctcagttggagct

SEQ ID NO: 3172 - DNA, 25 bp, probe
ttctttcctcagttggagctgatca

SEQ ID NO: 3173 - DNA, 25 bp, probe
tctttcctcagttggagctgatcac

SEQ ID NO: 3174 - DNA, 25 bp, probe
ctttcctcagttggagctgatcaca

SEQ ID NO: 3175 - DNA, 25 bp, probe
tttcctcagttggagctgatcacaa

SEQ ID NO: 3176 - DNA, 25 bp, probe
ttcctcagttggagctgatcacaac

SEQ ID NO: 3177 - DNA, 25 bp, probe
tcctcagttggagctgatcacaacc

SEQ ID NO: 3178 - DNA, 25 bp, probe
cctcagttggagctgatcacaaccc

SEQ ID NO: 3179 - DNA, 25 bp, probe
ctcagttggagctgatcacaaccca

SEQ ID NO: 3180 - DNA, 25 bp, probe
tcagttggagctgatcacaacccag

SEQ ID NO: 3181 - DNA, 25 bp, probe
agttggagctgatcacaacccaggc

SEQ ID NO: 3182 - DNA, 25 bp, probe
ttggagctgatcacaacccaggcca

SEQ ID NO: 3183 - DNA, 25 bp, probe
aacagggctggataggtatgcagag

SEQ ID NO: 3184 - DNA, 25 bp, probe
agttttgaaggtagtcgagcttggg

SEQ ID NO: 3185 - DNA, 25 bp, probe
gtcgagcttgggcaatttatccaac

SEQ ID NO: 3186 - DNA, 25 bp, probe
ttgggcaatttatccaacccattta

SEQ ID NO: 3187 - DNA, 25 bp, probe
tgggcaatttatccaacccatttaa

SEQ ID NO: 3188 - DNA, 25 bp, probe
aagaataccaatattcttttgttct

SEQ ID NO: 3189 - DNA, 25 bp, probe
gaataccaatattcttttgttctaa

SEQ ID NO: 3190 - DNA, 25 bp, probe
caatattcttttgttctaaaaatct

SEQ ID NO: 3191 - DNA, 25 bp, probe
tctcttatgggattacatgttatat

SEQ ID NO: 3192 - DNA, 25 bp, probe
attacatgttatatttttggtttct

SEQ ID NO: 3193 - DNA, 25 bp, probe
ttacatgttatatttttggtttctc

SEQ ID NO: 3194 - DNA, 25 bp, probe
gttatatttttggtttctctctact

SEQ ID NO: 3195 - DNA, 25 bp, probe
tcacaactcttctttcctttacgtt

SEQ ID NO: 3196 - DNA, 25 bp, probe
ttacgttttaacacacagacccaag

SEQ ID NO: 3197 - DNA, 25 bp, probe
tactattaagattctagtagaactc

SEQ ID NO: 3198 - DNA, 25 bp, probe
agattctagtagaactctagatggt

SEQ ID NO: 3199 - DNA, 25 bp, probe
ccgctgcagggtaaatgggattcct

SEQ ID NO: 3200 - DNA, 25 bp, probe
acatccacattctgttagaatgtag

SEQ ID NO: 3201 - DNA, 25 bp, probe
tcccttggggcttgccggccagact

SEQ ID NO: 3202 - DNA, 25 bp, probe
ggtggagcctctgtgtgactccata

SEQ ID NO: 3203 - DNA, 25 bp, probe
agcctctgtgtgactccatactcct

SEQ ID NO: 3204 - DNA, 25 bp, probe
ccgccttcagctgtcagctttctgg

SEQ ID NO: 3205 - DNA, 25 bp, probe
cttcagctgtcagctttctggggct

SEQ ID NO: 3206 - DNA, 25 bp, probe
ctgtcagctttctggggctaacttc

SEQ ID NO: 3207 - DNA, 25 bp, probe
cttggaactcttgctaacctgttca

SEQ ID NO: 3208 - DNA, 25 bp, probe
actcttgctaacctgttcagagcca

SEQ ID NO: 3209 - DNA, 25 bp, probe
gctaacctgttcagagccaggaagg

SEQ ID NO: 3210 - DNA, 25 bp, probe
ctgttcagagccaggaaggagactg

SEQ ID NO: 3211 - DNA, 25 bp, probe
gttttgaaagcacagcccgtcaggt

SEQ ID NO: 3212 - DNA, 25 bp, probe
ttttgaaagcacagcccgtcaggtc

SEQ ID NO: 3213 - DNA, 25 bp, probe
tctccctctctgcagcctgtgtaag

SEQ ID NO: 3214 - DNA, 25 bp, probe
ctctgcagcctgtgtaagctattat

SEQ ID NO: 3215 - DNA, 25 bp, probe
ttaattcatccaaatgtactgaggt

SEQ ID NO: 3216 - DNA, 25 bp, probe
ttaccacacacttgactacggatgt

SEQ ID NO: 3217 - DNA, 25 bp, probe
tgactacggatgtgatcaacactaa

SEQ ID NO: 3218 - DNA, 25 bp, probe
ttgagccagggcaggcctcagacac

SEQ ID NO: 3219 - DNA, 25 bp, probe
gcccggaatgccagtgctccgagct

SEQ ID NO: 3220 - DNA, 25 bp, probe
cggaatgccagtgctccgagctcag

SEQ ID NO: 3221 - DNA, 25 bp, probe
gctccgagctcagacagaggaagcc

SEQ ID NO: 3222 - DNA, 25 bp, probe
tcagacagaggaagccctgcagaaa

SEQ ID NO: 3223 - DNA, 25 bp, probe
ttttagcacagttcatagtccacag

SEQ ID NO: 3224 - DNA, 25 bp, probe
ttagcacagttcatagtccacagtt

SEQ ID NO: 3225 - DNA, 25 bp, probe
cagttcatagtccacagttgatgca

SEQ ID NO: 3226 - DNA, 25 bp, probe
cacagttgatgcagcatcctgagat

SEQ ID NO: 3227 - DNA, 25 bp, probe
ttgatgcagcatcctgagattttaa

SEQ ID NO: 3228 - DNA, 25 bp, probe
tgatgcagcatcctgagattttaaa

SEQ ID NO: 3229 - DNA, 25 bp, probe
gtggcgcacacaccaagtagggagc

SEQ ID NO: 3230 - DNA, 25 bp, probe
cgcacacaccaagtagggagctagt

SEQ ID NO: 3231 - DNA, 25 bp, probe
ttcgctgacatcctgcgagactaca

SEQ ID NO: 3232 - DNA, 25 bp, probe
gacatcctgcgagactacaaagtta

SEQ ID NO: 3233 - DNA, 25 bp, probe
ctgaagtacctatatcctgacattc

SEQ ID NO: 3234 - DNA, 25 bp, probe
ggtaaacactacagctctcagcctt

SEQ ID NO: 3235 - DNA, 25 bp, probe
tcaacaatccgaagtgattcaacag

SEQ ID NO: 3236 - DNA, 25 bp, probe
agtgattcaacagagccacattctc

SEQ ID NO: 3237 - DNA, 25 bp, probe
tcaacagagccacattctccatcag

SEQ ID NO: 3238 - DNA, 25 bp, probe
gagccacattctccatcagaccttc

SEQ ID NO: 3239 - DNA, 25 bp, probe
atgtctccaagtgtgtatgcggtgt

SEQ ID NO: 3240 - DNA, 25 bp, probe
gcaatgaagtctccttattctgctg

SEQ ID NO: 3241 - DNA, 25 bp, probe
aagtctccttattctgctgaatgac

SEQ ID NO: 3242 - DNA, 25 bp, probe
caggataaactctgacgcaccaaga

SEQ ID NO: 3243 - DNA, 25 bp, probe
gacatctgaagctctcttcacactc

SEQ ID NO: 3244 - DNA, 25 bp, probe
tgaagctctcttcacactcccgtgg

SEQ ID NO: 3245 - DNA, 25 bp, probe
tgttgtgactgaaatgcttgaaacc

SEQ ID NO: 3246 - DNA, 25 bp, probe
aatgcttgaaaccaaagcttcagat

SEQ ID NO: 3247 - DNA, 25 bp, probe
tacctcatgggaagagttacttttt

SEQ ID NO: 3248 - DNA, 25 bp, probe
agcatgttagttacttggtttcaac

SEQ ID NO: 3249 - DNA, 25 bp, probe
aatggaaagagttgcccttgttgca

SEQ ID NO: 3250 - DNA, 25 bp, probe
agttgcccttgttgcaagtaatgaa

SEQ ID NO: 3251 - DNA, 25 bp, probe
gcccttgttgcaagtaatgaagcct

SEQ ID NO: 3252 - DNA, 25 bp, probe
ccttgttgcaagtaatgaagcctga

SEQ ID NO: 3253 - DNA, 25 bp, probe
agcctgatttgattatgaagctgct

SEQ ID NO: 3254 - DNA, 25 bp, probe
tttgattatgaagctgcttaatcac

SEQ ID NO: 3255 - DNA, 25 bp, probe
gcttaatcactcttcatgtgttcag

SEQ ID NO: 3256 - DNA, 25 bp, probe
actcttcatgtgttcagaattactg

SEQ ID NO: 3257 - DNA, 25 bp, probe
tcttcatgtgttcagaattactgtt

SEQ ID NO: 3258 - DNA, 25 bp, probe
aatcattcagccacatacggttggc

SEQ ID NO: 3259 - DNA, 25 bp, probe
tcattcagccacatacggttggctg

SEQ ID NO: 3260 - DNA, 25 bp, probe
agccacatacggttggctggtaaac

SEQ ID NO: 3261 - DNA, 25 bp, probe
atacggttggctggtaaacagctta

SEQ ID NO: 3262 - DNA, 25 bp, probe
cttattctgatacaagaatgcttgg

SEQ ID NO: 3263 - DNA, 25 bp, probe
tacctgggctcaatggtttgaaacc

SEQ ID NO: 3264 - DNA, 25 bp, probe
cctgggctcaatggtttgaaaccca

SEQ ID NO: 3265 - DNA, 25 bp, probe
ctcaatggtttgaaacccagcacat

SEQ ID NO: 3266 - DNA, 25 bp, probe
ggtttgaaacccagcacatcaatat

SEQ ID NO: 3267 - DNA, 25 bp, probe
gtttgaaacccagcacatcaatatg

SEQ ID NO: 3268 - DNA, 25 bp, probe
atgacctcccagcaatgcaccaatg

SEQ ID NO: 3269 - DNA, 25 bp, probe
ctcccagcaatgcaccaatgcaatg

SEQ ID NO: 3270 - DNA, 25 bp, probe
gccaagctcctcaatcatagccaag

SEQ ID NO: 3271 - DNA, 25 bp, probe
tctctccatatactttgggtatcag

SEQ ID NO: 3272 - DNA, 25 bp, probe
ctccatatactttgggtatcagcat

SEQ ID NO: 3273 - DNA, 25 bp, probe
atatactttgggtatcagcatctgt

SEQ ID NO: 3274 - DNA, 25 bp, probe
atactttgggtatcagcatctgtcc

SEQ ID NO: 3275 - DNA, 25 bp, probe
tactttgggtatcagcatctgtcct

SEQ ID NO: 3276 - DNA, 25 bp, probe
actttgggtatcagcatctgtcctc

SEQ ID NO: 3277 - DNA, 25 bp, probe
tttgggtatcagcatctgtcctcat

SEQ ID NO: 3278 - DNA, 25 bp, probe
ggtatcagcatctgtcctcatcagt

SEQ ID NO: 3279 - DNA, 25 bp, probe
tgggcagacttcctgtctttgaggc

SEQ ID NO: 3280 - DNA, 25 bp, probe
gggcagacttcctgtctttgaggct

SEQ ID NO: 3281 - DNA, 25 bp, probe
gcagacttcctgtctttgaggctaa

SEQ ID NO: 3282 - DNA, 25 bp, probe
cagacttcctgtctttgaggctaat

SEQ ID NO: 3283 - DNA, 25 bp, probe
gacttcctgtctttgaggctaatgg

SEQ ID NO: 3284 - DNA, 25 bp, probe
acttcctgtctttgaggctaatgga

SEQ ID NO: 3285 - DNA, 25 bp, probe
ttcctgtctttgaggctaatggacc

SEQ ID NO: 3286 - DNA, 25 bp, probe
tgtctttgaggctaatggacccgtg

SEQ ID NO: 3287 - DNA, 25 bp, probe
tctttgaggctaatggacccgtggg

SEQ ID NO: 3288 - DNA, 25 bp, probe
ctaatggacccgtggggcttgtaat

SEQ ID NO: 3289 - DNA, 25 bp, probe
gacccgtggggcttgtaatctgtct

SEQ ID NO: 3290 - DNA, 25 bp, probe
acccgtggggcttgtaatctgtctc

SEQ ID NO: 3291 - DNA, 25 bp, probe
cccgtggggcttgtaatctgtctct

SEQ ID NO: 3292 - DNA, 25 bp, probe
ccgtggggcttgtaatctgtctctt

SEQ ID NO: 3293 - DNA, 25 bp, probe
gggcttgtaatctgtctctttctac

SEQ ID NO: 3294 - DNA, 25 bp, probe
ggcttgtaatctgtctctttctact

SEQ ID NO: 3295 - DNA, 25 bp, probe
aagcatccggtcagtaagaatgccc

SEQ ID NO: 3296 - DNA, 25 bp, probe
gtaagaatgcccatccagttttcta

SEQ ID NO: 3297 - DNA, 25 bp, probe
gtcaaagccttgaaagcatctacaa

SEQ ID NO: 3298 - DNA, 25 bp, probe
tgtccatagcatcagttgatcctta

SEQ ID NO: 3299 - DNA, 25 bp, probe
atgggagacttccttcatcacatct

SEQ ID NO: 3300 - DNA, 25 bp, probe
tgaaatcactttctgtagtcaaagt

SEQ ID NO: 3301 - DNA, 25 bp, probe
gaaatcactttctgtagtcaaagta

SEQ ID NO: 3302 - DNA, 25 bp, probe
ggttatacaaaccatatacatctgg

SEQ ID NO: 3303 - DNA, 25 bp, probe
tctggttaccaaacataaatgctga

SEQ ID NO: 3304 - DNA, 25 bp, probe
ggttaccaaacataaatgctgaaca

SEQ ID NO: 3305 - DNA, 25 bp, probe
atagttaatgtcttaatccagcttg

SEQ ID NO: 3306 - DNA, 25 bp, probe
agttaatgtcttaatccagcttgca

SEQ ID NO: 3307 - DNA, 25 bp, probe
tgtcttaatccagcttgcaagtgaa

SEQ ID NO: 3308 - DNA, 25 bp, probe
gcttcaaactaggtattctgggaat

SEQ ID NO: 3309 - DNA, 25 bp, probe
tagtaatttctatttgcactgtgcc

SEQ ID NO: 3310 - DNA, 25 bp, probe
gcactgtgcctttcaactccagaaa

SEQ ID NO: 3311 - DNA, 25 bp, probe
ctgaccactttggttgatgtatttt

SEQ ID NO: 3312 - DNA, 25 bp, probe
tttccatgcgtctccacatctgttg

SEQ ID NO: 3313 - DNA, 25 bp, probe
ctccacatctgttggggtagacgtg

SEQ ID NO: 3314 - DNA, 25 bp, probe
acagcccgtaccacatccaggagat

SEQ ID NO: 3315 - DNA, 25 bp, probe
cacatccaggagatgtaaaaagtgt

SEQ ID NO: 3316 - DNA, 25 bp, probe
tgtttgtgaatgtcttcacttgtac

SEQ ID NO: 3317 - DNA, 25 bp, probe
gtgaatgtcttcacttgtactctaa

SEQ ID NO: 3318 - DNA, 25 bp, probe
gtactctaattcagacttgccaaag

SEQ ID NO: 3319 - DNA, 25 bp, probe
gacttgccaaagtatttgctattta

SEQ ID NO: 3320 - DNA, 25 bp, probe
tatgggtaatactcttctctggcct

SEQ ID NO: 3321 - DNA, 25 bp, probe
gttcttacagagctactaaaataga

SEQ ID NO: 3322 - DNA, 25 bp, probe
tgaaattccctatagcagacagagc

SEQ ID NO: 3323 - DNA, 25 bp, probe
ctatagcagacagagctagggaaat

SEQ ID NO: 3324 - DNA, 25 bp, probe
agccttaactataacattatgagag

SEQ ID NO: 3325 - DNA, 25 bp, probe
gccttaactataacattatgagagt

SEQ ID NO: 3326 - DNA, 25 bp, probe
gtaatgggaactactgctggcttta

SEQ ID NO: 3327 - DNA, 25 bp, probe
gaggggtcacacattgcaaaacact

SEQ ID NO: 3328 - DNA, 25 bp, probe
acacattgcaaaacactgcccagaa

SEQ ID NO: 3329 - DNA, 25 bp, probe
attgcaaaacactgcccagaacagt

SEQ ID NO: 3330 - DNA, 25 bp, probe
acactgcccagaacagtaaaaagag

SEQ ID NO: 3331 - DNA, 25 bp, probe
gggcctagcagtcttcacctctgag

SEQ ID NO: 3332 - DNA, 25 bp, probe
agcagtcttcacctctgagtcaggc

SEQ ID NO: 3333 - DNA, 25 bp, probe
tcttcacctctgagtcaggctaggg

SEQ ID NO: 3334 - DNA, 25 bp, probe
cacctctgagtcaggctaggggcct

SEQ ID NO: 3335 - DNA, 25 bp, probe
ccgccaaggttctcacactggcctg

SEQ ID NO: 3336 - DNA, 25 bp, probe
tcacactggcctgggcttgggtgcc

SEQ ID NO: 3337 - DNA, 25 bp, probe
actggcctgggcttgggtgcccata

SEQ ID NO: 3338 - DNA, 25 bp, probe
gcttgggtgcccatataggaggtct

SEQ ID NO: 3339 - DNA, 25 bp, probe
gggtgcccatataggaggtctgtat

SEQ ID NO: 3340 - DNA, 25 bp, probe
gcccatataggaggtctgtatgttc

SEQ ID NO: 3341 - DNA, 25 bp, probe
atataggaggtctgtatgttcacca

SEQ ID NO: 3342 - DNA, 25 bp, probe
gtctgtatgttcaccaacagtgcgg

SEQ ID NO: 3343 - DNA, 25 bp, probe
caggcgaacgaggtgacggaaatta

SEQ ID NO: 3344 - DNA, 25 bp, probe
ttcaacaagactacacagaacctgg

SEQ ID NO: 3345 - DNA, 25 bp, probe
tcaacaagactacacagaacctggc

SEQ ID NO: 3346 - DNA, 25 bp, probe
caacaagactacacagaacctggcc

SEQ ID NO: 3347 - DNA, 25 bp, probe
acaagactacacagaacctggccca

SEQ ID NO: 3348 - DNA, 25 bp, probe
agactacacagaacctggcccagaa

SEQ ID NO: 3349 - DNA, 25 bp, probe
actacacagaacctggcccagaaga

SEQ ID NO: 3350 - DNA, 25 bp, probe
ctacacagaacctggcccagaagaa

SEQ ID NO: 3351 - DNA, 25 bp, probe
agaacctggcccagaagaagtgctg

SEQ ID NO: 3352 - DNA, 25 bp, probe
aacctggcccagaagaagtgctggg

SEQ ID NO: 3353 - DNA, 25 bp, probe
aagccaaatggctgcactggccgat

SEQ ID NO: 3354 - DNA, 25 bp, probe
gccaaatggctgcactggccgattc

SEQ ID NO: 3355 - DNA, 25 bp, probe
ccaaatggctgcactggccgattct

SEQ ID NO: 3356 - DNA, 25 bp, probe
aaatggctgcactggccgattctgg

SEQ ID NO: 3357 - DNA, 25 bp, probe
ctgcactggccgattctggtctcca

SEQ ID NO: 3358 - DNA, 25 bp, probe
ttggtgtttgctctcccttgaccca

SEQ ID NO: 3359 - DNA, 25 bp, probe
tgactgcggctgaggcaaagctgct

SEQ ID NO: 3360 - DNA, 25 bp, probe
gaggcaaagctgctcccaaggcctc

SEQ ID NO: 3361 - DNA, 25 bp, probe
cctggctaccccagagggagttgtc

SEQ ID NO: 3362 - DNA, 25 bp, probe
gagtggctggccttttaaatcgacg

SEQ ID NO: 3363 - DNA, 25 bp, probe
ctggccttttaaatcgacgtctctc

SEQ ID NO: 3364 - DNA, 25 bp, probe
caccaggatttggtgtttagctgtt

SEQ ID NO: 3365 - DNA, 25 bp, probe
gttagtacgtgttcttctgtcaggg

SEQ ID NO: 3366 - DNA, 25 bp, probe
ttagtacgtgttcttctgtcagggc

SEQ ID NO: 3367 - DNA, 25 bp, probe
cgtgttcttctgtcagggccaaaac

SEQ ID NO: 3368 - DNA, 25 bp, probe
tctcctgtgaaatacgtattgataa

SEQ ID NO: 3369 - DNA, 25 bp, probe
ctcctgtgaaatacgtattgataat

SEQ ID NO: 3370 - DNA, 25 bp, probe
atctcaggtaataaggctttagaac

SEQ ID NO: 3371 - DNA, 25 bp, probe
tgataaagcggatcgttctcaggcc

SEQ ID NO: 3372 - DNA, 25 bp, probe
cccggagtacttcagaatgcaataa

SEQ ID NO: 3373 - DNA, 25 bp, probe
ttgcagagtggttgcggccagcacc

SEQ ID NO: 3374 - DNA, 25 bp, probe
cttacagacgattaactatgggcgg

SEQ ID NO: 3375 - DNA, 25 bp, probe
tgacaccctgcgagaagtcactgtt

SEQ ID NO: 3376 - DNA, 25 bp, probe
cctgcgagaagtcactgttactgtc

SEQ ID NO: 3377 - DNA, 25 bp, probe
ggccccttgatctgtaaaggtgtct

SEQ ID NO: 3378 - DNA, 25 bp, probe
ctgtaaaggtgtcttccacgctata

SEQ ID NO: 3379 - DNA, 25 bp, probe
cttccacgctatagtctctggaggt

SEQ ID NO: 3380 - DNA, 25 bp, probe
cgctatagtctctggaggtcatgaa

SEQ ID NO: 3381 - DNA, 25 bp, probe
catgaatgtggtgttgccacaaagc

SEQ ID NO: 3382 - DNA, 25 bp, probe
tgtggtgttgccacaaagcctggaa

SEQ ID NO: 3383 - DNA, 25 bp, probe
cacaaagcctggaatctacaccctg

SEQ ID NO: 3384 - DNA, 25 bp, probe
aaagcctggaatctacaccctgtta

SEQ ID NO: 3385 - DNA, 25 bp, probe
gttaaccaagaaataccagacttgg

SEQ ID NO: 3386 - DNA, 25 bp, probe
ataccagacttggatcaaaagcaac

SEQ ID NO: 3387 - DNA, 25 bp, probe
ttttcctaatatgctcgcaggttag

SEQ ID NO: 3388 - DNA, 25 bp, probe
taaagcagagcacatatggggtcca

SEQ ID NO: 3389 - DNA, 25 bp, probe
cacatatggggtccatttttgcact

SEQ ID NO: 3390 - DNA, 25 bp, probe
gtccatttttgcacttgtaagtcat

SEQ ID NO: 3391 - DNA, 25 bp, probe
ccactggcccactggtggctaggtc

SEQ ID NO: 3392 - DNA, 25 bp, probe
actggcccactggtggctaggtctc

SEQ ID NO: 3393 - DNA, 25 bp, probe
ctggcccactggtggctaggtctcc

SEQ ID NO: 3394 - DNA, 25 bp, probe
cactggtggctaggtctccccttat

SEQ ID NO: 3395 - DNA, 25 bp, probe
ctggtggctaggtctccccttatcc

SEQ ID NO: 3396 - DNA, 25 bp, probe
ggtggctaggtctccccttatcctt

SEQ ID NO: 3397 - DNA, 25 bp, probe
ccttatccttctggtccagcgcaag

SEQ ID NO: 3398 - DNA, 25 bp, probe
cttatccttctggtccagcgcaagg

SEQ ID NO: 3399 - DNA, 25 bp, probe
atccttctggtccagcgcaaggagg

SEQ ID NO: 3400 - DNA, 25 bp, probe
ctgcttctgaggtcggtggctgtct

SEQ ID NO: 3401 - DNA, 25 bp, probe
ttctgaggtcggtggctgtctttcc

SEQ ID NO: 3402 - DNA, 25 bp, probe
gaggtcggtggctgtctttccatta

SEQ ID NO: 3403 - DNA, 25 bp, probe
aggtcggtggctgtctttccattaa

SEQ ID NO: 3404 - DNA, 25 bp, probe
tcggtggctgtctttccattaaaga

SEQ ID NO: 3405 - DNA, 25 bp, probe
cggtggctgtctttccattaaagaa

SEQ ID NO: 3406 - DNA, 25 bp, probe
ggtggctgtctttccattaaagaaa

SEQ ID NO: 3407 - DNA, 25 bp, probe
atgagccaaaccagggatttacagg

SEQ ID NO: 3408 - DNA, 25 bp, probe
gccaaaccagggatttacagggagg

SEQ ID NO: 3409 - DNA, 25 bp, probe
tgccatcctaaaaatgatcctgatg

SEQ ID NO: 3410 - DNA, 25 bp, probe
gccatcctaaaaatgatcctgatgt

SEQ ID NO: 3411 - DNA, 25 bp, probe
atcctaaaaatgatcctgatgtatg

SEQ ID NO: 3412 - DNA, 25 bp, probe
tcctaaaaatgatcctgatgtatga

SEQ ID NO: 3413 - DNA, 25 bp, probe
cctaaaaatgatcctgatgtatgag

SEQ ID NO: 3414 - DNA, 25 bp, probe
gaggcctccagcttggtctgtctcc

SEQ ID NO: 3415 - DNA, 25 bp, probe
taccagcatctgctgagctatgagc

SEQ ID NO: 3416 - DNA, 25 bp, probe
accagcatctgctgagctatgagcc

SEQ ID NO: 3417 - DNA, 25 bp, probe
agcatctgctgagctatgagccaaa

SEQ ID NO: 3418 - DNA, 25 bp, probe
atctgctgagctatgagccaaacca

SEQ ID NO: 3419 - DNA, 25 bp, probe
tgctgagctatgagccaaaccaggg

SEQ ID NO: 3420 - DNA, 25 bp, probe
gagctatgagccaaaccagggattt

SEQ ID NO: 3421 - DNA, 25 bp, probe
gctatgagccaaaccagggatttac

SEQ ID NO: 3422 - DNA, 25 bp, probe
tatgagccaaaccagggatttacag

SEQ ID NO: 3423 - DNA, 25 bp, probe
cctgggccatagtcattctgcctgc

SEQ ID NO: 3424 - DNA, 25 bp, probe
ctgggccatagtcattctgcctgcc

SEQ ID NO: 3425 - DNA, 25 bp, probe
ggccatagtcattctgcctgccctg

SEQ ID NO: 3426 - DNA, 25 bp, probe
ccatagtcattctgcctgccctgaa

SEQ ID NO: 3427 - DNA, 25 bp, probe
agtcattctgcctgccctgaaagtc

SEQ ID NO: 3428 - DNA, 25 bp, probe
gcctgccctgaaagtcccagatcaa

SEQ ID NO: 3429 - DNA, 25 bp, probe
cctgccctgaaagtcccagatcaag

SEQ ID NO: 3430 - DNA, 25 bp, probe
ctgccctgaaagtcccagatcaagc

SEQ ID NO: 3431 - DNA, 25 bp, probe
cctgaaagtcccagatcaagcctgc

SEQ ID NO: 3432 - DNA, 25 bp, probe
ctgaaagtcccagatcaagcctgcc

SEQ ID NO: 3433 - DNA, 25 bp, probe
gaaagtcccagatcaagcctgcctc

SEQ ID NO: 3434 - DNA, 25 bp, probe
ttatagccaggtaccttctcacctg

SEQ ID NO: 3435 - DNA, 25 bp, probe
agccaggtaccttctcacctgtgag

SEQ ID NO: 3436 - DNA, 25 bp, probe
gccaggtaccttctcacctgtgaga

SEQ ID NO: 3437 - DNA, 25 bp, probe
ctcccaactataaaactaggtgctg

SEQ ID NO: 3438 - DNA, 25 bp, probe
aactataaaactaggtgctgcagcc

SEQ ID NO: 3439 - DNA, 25 bp, probe
gtgaagatcctcaaagacttccctg

SEQ ID NO: 3440 - DNA, 25 bp, probe
atcctcaaagacttccctgaggagg

SEQ ID NO: 3441 - DNA, 25 bp, probe
ccaccaactggctgcgttgctacta

SEQ ID NO: 3442 - DNA, 25 bp, probe
agaggacatagctctgaattaccgg

SEQ ID NO: 3443 - DNA, 25 bp, probe
gacatagctctgaattaccgggacg

SEQ ID NO: 3444 - DNA, 25 bp, probe
atctggttcggctgctgtcggatga

SEQ ID NO: 3445 - DNA, 25 bp, probe
ctgtcggatgaggacgtagcgctca

SEQ ID NO: 3446 - DNA, 25 bp, probe
tgtcggatgaggacgtagcgctcat

SEQ ID NO: 3447 - DNA, 25 bp, probe
ccctggaagctgcacatcacgcaga

SEQ ID NO: 3448 - DNA, 25 bp, probe
tggaagctgcacatcacgcagaagg

SEQ ID NO: 3449 - DNA, 25 bp, probe
atcacgcagaaggacaactacaggg

SEQ ID NO: 3450 - DNA, 25 bp, probe
aacacgatgccatgagctgacggtg

SEQ ID NO: 3451 - DNA, 25 bp, probe
atgccatgagctgacggtgtccctg

SEQ ID NO: 3452 - DNA, 25 bp, probe
tgccatgagctgacggtgtccctgg

SEQ ID NO: 3453 - DNA, 25 bp, probe
aaaccttcagctctcagaggagatt

SEQ ID NO: 3454 - DNA, 25 bp, probe
tcagctctcagaggagattgggacc

SEQ ID NO: 3455 - DNA, 25 bp, probe
tggttacagccacagggaggcatgg

SEQ ID NO: 3456 - DNA, 25 bp, probe
gagtgccatggaaggattcgccact

SEQ ID NO: 3457 - DNA, 25 bp, probe
ttttcctcagattaaaagatgatgc

SEQ ID NO: 3458 - DNA, 25 bp, probe
tatgaatcccaaaggccacatccaa

SEQ ID NO: 3459 - DNA, 25 bp, probe
aggccacatccaagacaggcaataa

SEQ ID NO: 3460 - DNA, 25 bp, probe
tagttccctcaacacaattgctaat

SEQ ID NO: 3461 - DNA, 25 bp, probe
cctcaacacaattgctaatgcagaa

SEQ ID NO: 3462 - DNA, 25 bp, probe
cacaattgctaatgcagaatagtgt

SEQ ID NO: 3463 - DNA, 25 bp, probe
agaattgtggctttagtagcacaga

SEQ ID NO: 3464 - DNA, 25 bp, probe
catggcgttgaaaccacacagttct

SEQ ID NO: 3465 - DNA, 25 bp, probe
tttattagctgtagcattctctgtc

SEQ ID NO: 3466 - DNA, 25 bp, probe
agctgtagcattctctgtctcctct

SEQ ID NO: 3467 - DNA, 25 bp, probe
cgaccagccatcatgacatttacca

SEQ ID NO: 3468 - DNA, 25 bp, probe
gccatcatgacatttaccatgaatt

SEQ ID NO: 3469 - DNA, 25 bp, probe
ttggactgcccgtcagattgtttct

SEQ ID NO: 3470 - DNA, 25 bp, probe
tgtttctgcacatagttgcctttgt

SEQ ID NO: 3471 - DNA, 25 bp, probe
cttcccatgggcattgcaagtgcca

SEQ ID NO: 3472 - DNA, 25 bp, probe
atgggcattgcaagtgccaccgtgc

SEQ ID NO: 3473 - DNA, 25 bp, probe
gcctggctctgcacacccaggaaaa

SEQ ID NO: 3474 - DNA, 25 bp, probe
acacccaggaaaagtctgcagaccc

SEQ ID NO: 3475 - DNA, 25 bp, probe
cgcaataattcaccagaccagaagc

SEQ ID NO: 3476 - DNA, 25 bp, probe
aattcaccagaccagaagccactgg

SEQ ID NO: 3477 - DNA, 25 bp, probe
caccagaccagaagccactggtgta

SEQ ID NO: 3478 - DNA, 25 bp, probe
cagaagccactggtgtacagagaac

SEQ ID NO: 3479 - DNA, 25 bp, probe
ccactggtgtacagagaacacttaa

SEQ ID NO: 3480 - DNA, 25 bp, probe
aactctgtatactgtatcagcagct

SEQ ID NO: 3481 - DNA, 25 bp, probe
actgtatcagcagctttgtgtaaaa

SEQ ID NO: 3482 - DNA, 25 bp, probe
tttgatatcgtactgaggtaacttc

SEQ ID NO: 3483 - DNA, 25 bp, probe
gaggtaacttccacgtagccccttg

SEQ ID NO: 3484 - DNA, 25 bp, probe
cccaaagggggcacatgtccctgga

SEQ ID NO: 3485 - DNA, 25 bp, probe
acatgtccctggagttgcttccagc

SEQ ID NO: 3486 - DNA, 25 bp, probe
gcctgtgacagaattcgctgttaag

SEQ ID NO: 3487 - DNA, 25 bp, probe
tggtgcactcccaggctcaggctgg

SEQ ID NO: 3488 - DNA, 25 bp, probe
agctgctgcgtctgtggtcaggcct

SEQ ID NO: 3489 - DNA, 25 bp, probe
gcgtctgtggtcaggcctcctgctc

SEQ ID NO: 3490 - DNA, 25 bp, probe
ctcctgccagggagcacgcgtggtc

SEQ ID NO: 3491 - DNA, 25 bp, probe
cacgcgtggtcttcgggttgagctc

SEQ ID NO: 3492 - DNA, 25 bp, probe
gtgcgcatggctgctcatggtccca

SEQ ID NO: 3493 - DNA, 25 bp, probe
ggctactgtgagagccagcatccaa

SEQ ID NO: 3494 - DNA, 25 bp, probe
cccacgcttgcagtgactcagaatg

SEQ ID NO: 3495 - DNA, 25 bp, probe
cttgcagtgactcagaatgataatt

SEQ ID NO: 3496 - DNA, 25 bp, probe
tattatgactgtttatcgatgcttc

SEQ ID NO: 3497 - DNA, 25 bp, probe
cccacagtgtggtagaaagtcttga

SEQ ID NO: 3498 - DNA, 25 bp, probe
acaagccgggtgtccagggcactgc

SEQ ID NO: 3499 - DNA, 25 bp, probe
gtgtccagggcactgccggtgccac

SEQ ID NO: 3500 - DNA, 25 bp, probe
ctttgcactcctcatggttgcccag

SEQ ID NO: 3501 - DNA, 25 bp, probe
tttgcactcctcatggttgcccagc

SEQ ID NO: 3502 - DNA, 25 bp, probe
ccagccctccattgtctgtgttttt

SEQ ID NO: 3503 - DNA, 25 bp, probe
aggaagacgctgcagtgaattgcac

SEQ ID NO: 3504 - DNA, 25 bp, probe
cgctgcagtgaattgcacagatatt

SEQ ID NO: 3505 - DNA, 25 bp, probe
tcccgtcagtcatcctttattgcag

SEQ ID NO: 3506 - DNA, 25 bp, probe
cccgtcagtcatcctttattgcagt

SEQ ID NO: 3507 - DNA, 25 bp, probe
agtcatcctttattgcagtcgggat

SEQ ID NO: 3508 - DNA, 25 bp, probe
ggggttgttctgttggccattttcg

SEQ ID NO: 3509 - DNA, 25 bp, probe
gggttgttctgttggccattttcgt

SEQ ID NO: 3510 - DNA, 25 bp, probe
ttcctcaagaggagagaacttagtc

SEQ ID NO: 3511 - DNA, 25 bp, probe
tcaataccgggagatgaattcttgc

SEQ ID NO: 3512 - DNA, 25 bp, probe
tgcagatgatctggacctaatgaat

SEQ ID NO: 3513 - DNA, 25 bp, probe
atctggacctaatgaattcctcagg

SEQ ID NO: 3514 - DNA, 25 bp, probe
agccacactgaaaaggaaaatggga

SEQ ID NO: 3515 - DNA, 25 bp, probe
gttcagcctttaagataccttgatg

SEQ ID NO: 3516 - DNA, 25 bp, probe
gagcagaaattcacctctctcactg

SEQ ID NO: 3517 - DNA, 25 bp, probe
tcttctcctaggattcctaagactg

SEQ ID NO: 3518 - DNA, 25 bp, probe
tcctaagactgctgctgaatttata

SEQ ID NO: 3519 - DNA, 25 bp, probe
tcaagaccaagttcctctctgagat

SEQ ID NO: 3520 - DNA, 25 bp, probe
cctctctgagatcgaaagtgacagc

SEQ ID NO: 3521 - DNA, 25 bp, probe
aggtccgagccatcctagaggatct

SEQ ID NO: 3522 - DNA, 25 bp, probe
gctgtgtcccagagggctgcccagc

SEQ ID NO: 3523 - DNA, 25 bp, probe
ccctcgctgtgtggtcacgttcctg

SEQ ID NO: 3524 - DNA, 25 bp, probe
ctgtgtggtcacgttcctgcagtca

SEQ ID NO: 3525 - DNA, 25 bp, probe
aggtgcggccctggtcaccgctgtt

SEQ ID NO: 3526 - DNA, 25 bp, probe
agttgactcgtgtctgaggaaacct

SEQ ID NO: 3527 - DNA, 25 bp, probe
tgactcgtgtctgaggaaacctcca

SEQ ID NO: 3528 - DNA, 25 bp, probe
tcgtgtctgaggaaacctccaggct

SEQ ID NO: 3529 - DNA, 25 bp, probe
acctccaggctgaggaggtctccgc

SEQ ID NO: 3530 - DNA, 25 bp, probe
ctccaggctgaggaggtctccgccg

SEQ ID NO: 3531 - DNA, 25 bp, probe
ggccatttggccttgctccctggct

SEQ ID NO: 3532 - DNA, 25 bp, probe
gccatttggccttgctccctggctt

SEQ ID NO: 3533 - DNA, 25 bp, probe
tggctttccctgagagaagtagcac

SEQ ID NO: 3534 - DNA, 25 bp, probe
agaagtagcactcaggttagcaata

SEQ ID NO: 3535 - DNA, 25 bp, probe
tcccagctgcactgcttacacgtct

SEQ ID NO: 3536 - DNA, 25 bp, probe
cttacacgtcttccttcgtcttcac

SEQ ID NO: 3537 - DNA, 25 bp, probe
agcagcagcaatgagccttcctctg

SEQ ID NO: 3538 - DNA, 25 bp, probe
agtctgctttgcagaccgagattgc

SEQ ID NO: 3539 - DNA, 25 bp, probe
tagagttcatcctggcagctcaccg

SEQ ID NO: 3540 - DNA, 25 bp, probe
cctgggcttcccagaagagatgtct

SEQ ID NO: 3541 - DNA, 25 bp, probe
atgtctgtggcttcccttgatctga

SEQ ID NO: 3542 - DNA, 25 bp, probe
ccttgatctgactgggggcctgcca

SEQ ID NO: 3543 - DNA, 25 bp, probe
cccaagccctcagtggaacctgtca

SEQ ID NO: 3544 - DNA, 25 bp, probe
tggaacctgtcaagagcatcagcag

SEQ ID NO: 3545 - DNA, 25 bp, probe
agccctttgatgacttcctgttccc

SEQ ID NO: 3546 - DNA, 25 bp, probe
ttcctgttcccagcatcatccaggc

SEQ ID NO: 3547 - DNA, 25 bp, probe
gacctatctgggtccttctatgcag

SEQ ID NO: 3548 - DNA, 25 bp, probe
ctatgcagcagactgggagcctctg

SEQ ID NO: 3549 - DNA, 25 bp, probe
gcccatggccacagagctggagccc

SEQ ID NO: 3550 - DNA, 25 bp, probe
gagcccctgtgcactccggtggtca

SEQ ID NO: 3551 - DNA, 25 bp, probe
agaagatcctctaatggatcccagt

SEQ ID NO: 3552 - DNA, 25 bp, probe
tcctctaatggatcccagtgtgccc

SEQ ID NO: 3553 - DNA, 25 bp, probe
ctaatggatcccagtgtgcccatcc

SEQ ID NO: 3554 - DNA, 25 bp, probe
aacctcctcagtgatcaactcatgg

SEQ ID NO: 3555 - DNA, 25 bp, probe
acctcctcagtgatcaactcatggc

SEQ ID NO: 3556 - DNA, 25 bp, probe
ctcctcagtgatcaactcatggcca

SEQ ID NO: 3557 - DNA, 25 bp, probe
cctcagtgatcaactcatggccaat

SEQ ID NO: 3558 - DNA, 25 bp, probe
ctcagtgatcaactcatggccaatc

SEQ ID NO: 3559 - DNA, 25 bp, probe
tcagtgatcaactcatggccaatct

SEQ ID NO: 3560 - DNA, 25 bp, probe
ttcaacctgctgacttccctctgga

SEQ ID NO: 3561 - DNA, 25 bp, probe
tcaacctgctgacttccctctggat

SEQ ID NO: 3562 - DNA, 25 bp, probe
aacctgctgacttccctctggattc

SEQ ID NO: 3563 - DNA, 25 bp, probe
tccctctggattcttctgcaaccag

SEQ ID NO: 3564 - DNA, 25 bp, probe
cctctggattcttctgcaaccagtc

SEQ ID NO: 3565 - DNA, 25 bp, probe
tggattcttctgcaaccagtcccag

SEQ ID NO: 3566 - DNA, 25 bp, probe
gattcttctgcaaccagtcccagat

SEQ ID NO: 3567 - DNA, 25 bp, probe
gagctggacctccaagtgctggaca

SEQ ID NO: 3568 - DNA, 25 bp, probe
tccaagtgctggacacccgcatgtg

SEQ ID NO: 3569 - DNA, 25 bp, probe
caagtgctggacacccgcatgtgta

SEQ ID NO: 3570 - DNA, 25 bp, probe
gacacccgcatgtgtaacaacagcc

SEQ ID NO: 3571 - DNA, 25 bp, probe
acacccgcatgtgtaacaacagccg

SEQ ID NO: 3572 - DNA, 25 bp, probe
gcatgtgtaacaacagccgcttctg

SEQ ID NO: 3573 - DNA, 25 bp, probe
atgtgtaacaacagccgcttctgga

SEQ ID NO: 3574 - DNA, 25 bp, probe
tggcggccgactccaaggaccaggc

SEQ ID NO: 3575 - DNA, 25 bp, probe
caggctccctgcaagggtgactcgg

SEQ ID NO: 3576 - DNA, 25 bp, probe
ggtgttggccggagtcctgtccttc

SEQ ID NO: 3577 - DNA, 25 bp, probe
tgttggccggagtcctgtccttcag

SEQ ID NO: 3578 - DNA, 25 bp, probe
ccagggtctgcactgacatcttcaa

SEQ ID NO: 3579 - DNA, 25 bp, probe
gggtctgcactgacatcttcaagcc

SEQ ID NO: 3580 - DNA, 25 bp, probe
tgtggcgccttacgtgtcctggatc

SEQ ID NO: 3581 - DNA, 25 bp, probe
tggcgccttacgtgtcctggatcag

SEQ ID NO: 3582 - DNA, 25 bp, probe
cttacgtgtcctggatcaggaaggt

SEQ ID NO: 3583 - DNA, 25 bp, probe
tgacacttcaaggtgacagaaggac

SEQ ID NO: 3584 - DNA, 25 bp, probe
gcccatccatagtaactgacatgat

SEQ ID NO: 3585 - DNA, 25 bp, probe
ccatagtaactgacatgattagcag

SEQ ID NO: 3586 - DNA, 25 bp, probe
catagtaactgacatgattagcaga

SEQ ID NO: 3587 - DNA, 25 bp, probe
ctgtgctatcatgatggaatttcat

SEQ ID NO: 3588 - DNA, 25 bp, probe
tgtacagacttgttgtgactttgac

SEQ ID NO: 3589 - DNA, 25 bp, probe
gacttgttgtgactttgacgcttgc

SEQ ID NO: 3590 - DNA, 25 bp, probe
cgcttgcgaactagagatgtgcaat

SEQ ID NO: 3591 - DNA, 25 bp, probe
gcttgcgaactagagatgtgcaatt

SEQ ID NO: 3592 - DNA, 25 bp, probe
tcaatcactgtcctccacacaaggg

SEQ ID NO: 3593 - DNA, 25 bp, probe
ccacacaagggaaggacagaaagga

SEQ ID NO: 3594 - DNA, 25 bp, probe
caaggccttaagctttggacccaag

SEQ ID NO: 3595 - DNA, 25 bp, probe
aaactgcatggagacgcatttcggt

SEQ ID NO: 3596 - DNA, 25 bp, probe
catggagacgcatttcggttgagaa

SEQ ID NO: 3597 - DNA, 25 bp, probe
atttcggttgagaatggaaaccaca

SEQ ID NO: 3598 - DNA, 25 bp, probe
gaggagttccacagattgtttctat

SEQ ID NO: 3599 - DNA, 25 bp, probe
cctatttgagggtgtctgtctggag

SEQ ID NO: 3600 - DNA, 25 bp, probe
ctgtctggagacttagagtttgtca

SEQ ID NO: 3601 - DNA, 25 bp, probe
cctcccatgtgcagacagtgtgtct

SEQ ID NO: 3602 - DNA, 25 bp, probe
catgtgcagacagtgtgtctttata

SEQ ID NO: 3603 - DNA, 25 bp, probe
tttccccaatgatgtcggtaatttc

SEQ ID NO: 3604 - DNA, 25 bp, probe
tccccaatgatgtcggtaatttctg

SEQ ID NO: 3605 - DNA, 25 bp, probe
aatttctgatgtttctgaagttccc

SEQ ID NO: 3606 - DNA, 25 bp, probe
cacccagtgtgacaaccctcggtgt

SEQ ID NO: 3607 - DNA, 25 bp, probe
acccagtgtgacaaccctcggtgtg

SEQ ID NO: 3608 - DNA, 25 bp, probe
cggtgtggatatacccccgtggact

SEQ ID NO: 3609 - DNA, 25 bp, probe
atacccccgtggactcatggctctt

SEQ ID NO: 3610 - DNA, 25 bp, probe
tctctgttgcaaaactcagctaagt

SEQ ID NO: 3611 - DNA, 25 bp, probe
tctgttgcaaaactcagctaagttc

SEQ ID NO: 3612 - DNA, 25 bp, probe
gcaaaactcagctaagttcctgctt

SEQ ID NO: 3613 - DNA, 25 bp, probe
taagttcctgcttccaccttgatgt

SEQ ID NO: 3614 - DNA, 25 bp, probe
cctgcttccaccttgatgttgaaat

SEQ ID NO: 3615 - DNA, 25 bp, probe
aagacgttctcctctgcccgtgagg

SEQ ID NO: 3616 - DNA, 25 bp, probe
gttctccgaggcatgtgtctccctg

SEQ ID NO: 3617 - DNA, 25 bp, probe
catctgtggacttgagcgtccaaaa

SEQ ID NO: 3618 - DNA, 25 bp, probe
tgagcgtccaaaaaccctgagtgtg

SEQ ID NO: 3619 - DNA, 25 bp, probe
aaccctgagtgtgattctgggcagc

SEQ ID NO: 3620 - DNA, 25 bp, probe
ccggcctggcttgaagtccgccatg

SEQ ID NO: 3621 - DNA, 25 bp, probe
atgaccctgggcacaggggaagccc

SEQ ID NO: 3622 - DNA, 25 bp, probe
agtgttcagaattccagccgctcat

SEQ ID NO: 3623 - DNA, 25 bp, probe
ttccagccgctcatctgaacacaga

SEQ ID NO: 3624 - DNA, 25 bp, probe
ccgctcatctgaacacagaaggtgt

SEQ ID NO: 3625 - DNA, 25 bp, probe
atctgaacacagaaggtgtgaactg

SEQ ID NO: 3626 - DNA, 25 bp, probe
tgaactgacctctaaagcagcgtga

SEQ ID NO: 3627 - DNA, 25 bp, probe
tgacctctaaagcagcgtgagatgg

SEQ ID NO: 3628 - DNA, 25 bp, probe
gacctctaaagcagcgtgagatggg

SEQ ID NO: 3629 - DNA, 25 bp, probe
aaatgtcattgaaagccttattacg

SEQ ID NO: 3630 - DNA, 25 bp, probe
aatgtcattgaaagccttattacgc

SEQ ID NO: 3631 - DNA, 25 bp, probe
tccagccagaacatctttaggtatc

SEQ ID NO: 3632 - DNA, 25 bp, probe
tggagtatggcaccttgcattattt

SEQ ID NO: 3633 - DNA, 25 bp, probe
gtatggcaccttgcattattttgtc

SEQ ID NO: 3634 - DNA, 25 bp, probe
ccggaaaccaagcaaggacaaagat

SEQ ID NO: 3635 - DNA, 25 bp, probe
tgatatccgcccaagatcagcaacc

SEQ ID NO: 3636 - DNA, 25 bp, probe
gatatccgcccaagatcagcaacca

SEQ ID NO: 3637 - DNA, 25 bp, probe
gaataatgctacacaccttcaagag

SEQ ID NO: 3638 - DNA, 25 bp, probe
caccttcaagagagagatgaagagt

SEQ ID NO: 3639 - DNA, 25 bp, probe
ggaggatacatatccgcattgccaa

SEQ ID NO: 3640 - DNA, 25 bp, probe
ccgcattgccaaaatggactcctat

SEQ ID NO: 3641 - DNA, 25 bp, probe
tgccaaaatggactcctatgctcgg

SEQ ID NO: 3642 - DNA, 25 bp, probe
tatgctcggatcttcttccccactg

SEQ ID NO: 3643 - DNA, 25 bp, probe
ctgccttctgcctgtttaatctggt

SEQ ID NO: 3644 - DNA, 25 bp, probe
gtttaatctggtctattgggtctcc

SEQ ID NO: 3645 - DNA, 25 bp, probe
taatctggtctattgggtctcctac

SEQ ID NO: 3646 - DNA, 25 bp, probe
ttgggtctcctacctctacctgtga

SEQ ID NO: 3647 - DNA, 25 bp, probe
gggtgctgcccaccatgctcctgag

SEQ ID NO: 3648 - DNA, 25 bp, probe
ggatggccactgtgaaggacgcctt

SEQ ID NO: 3649 - DNA, 25 bp, probe
gccactgtgaaggacgccttcccag

SEQ ID NO: 3650 - DNA, 25 bp, probe
ctgcccgttgccaatctgctgtgag

SEQ ID NO: 3651 - DNA, 25 bp, probe
ccgttgccaatctgctgtgagaggg

SEQ ID NO: 3652 - DNA, 25 bp, probe
tttcctccggggagaaaggacactg

SEQ ID NO: 3653 - DNA, 25 bp, probe
tcctccggggagaaaggacactgcc

SEQ ID NO: 3654 - DNA, 25 bp, probe
actgctgccttctcccaggacggag

SEQ ID NO: 3655 - DNA, 25 bp, probe
ctgccttctcccaggacggaggctt

SEQ ID NO: 3656 - DNA, 25 bp, probe
ccttctcccaggacggaggcttttg

SEQ ID NO: 3657 - DNA, 25 bp, probe
caggacggaggcttttggaccctcg

SEQ ID NO: 3658 - DNA, 25 bp, probe
tcccactcagccaagtgtctttctg

SEQ ID NO: 3659 - DNA, 25 bp, probe
ccactcagccaagtgtctttctgtg

SEQ ID NO: 3660 - DNA, 25 bp, probe
actcagccaagtgtctttctgtgtc

SEQ ID NO: 3661 - DNA, 25 bp, probe
ccaagtgtctttctgtgtctggggg

SEQ ID NO: 3662 - DNA, 25 bp, probe
ttttaagctccgtgagtgcgtgggt

SEQ ID NO: 3663 - DNA, 25 bp, probe
cgagctgtggcaatggaattcagca

SEQ ID NO: 3664 - DNA, 25 bp, probe
cctgcgatagcctcaacaaccgatg

SEQ ID NO: 3665 - DNA, 25 bp, probe
gcgatagcctcaacaaccgatgtga

SEQ ID NO: 3666 - DNA, 25 bp, probe
tagcctcaacaaccgatgtgagggc

SEQ ID NO: 3667 - DNA, 25 bp, probe
tgttggcccagcgactctgcggacg

SEQ ID NO: 3668 - DNA, 25 bp, probe
ggcccagcgactctgcggacgatgg

SEQ ID NO: 3669 - DNA, 25 bp, probe
cgactctgcggacgatggctggtct

SEQ ID NO: 3670 - DNA, 25 bp, probe
ctctgcggacgatggctggtctcca

SEQ ID NO: 3671 - DNA, 25 bp, probe
cggacgatggctggtctccatggtc

SEQ ID NO: 3672 - DNA, 25 bp, probe
tccatggtccgagtggacctcctgt

SEQ ID NO: 3673 - DNA, 25 bp, probe
tggtccgagtggacctcctgttcta

SEQ ID NO: 3674 - DNA, 25 bp, probe
tccgagtggacctcctgttctacga

SEQ ID NO: 3675 - DNA, 25 bp, probe
agtggacctcctgttctacgagctg

SEQ ID NO: 3676 - DNA, 25 bp, probe
gacctcctgttctacgagctgtggc

SEQ ID NO: 3677 - DNA, 25 bp, probe
ctcctgttctacgagctgtggcaat

SEQ ID NO: 3678 - DNA, 25 bp, probe
tgttctacgagctgtggcaatggaa

SEQ ID NO: 3679 - DNA, 25 bp, probe
ctggcacgtggcttcagccccaagg

SEQ ID NO: 3680 - DNA, 25 bp, probe
tggcacgtggcttcagccccaagga

SEQ ID NO: 3681 - DNA, 25 bp, probe
ggcacgtggcttcagccccaaggat

SEQ ID NO: 3682 - DNA, 25 bp, probe
gcacgtggcttcagccccaaggatg

SEQ ID NO: 3683 - DNA, 25 bp, probe
cttcagccccaaggatgtgctggtt

SEQ ID NO: 3684 - DNA, 25 bp, probe
ttcagccccaaggatgtgctggttc

SEQ ID NO: 3685 - DNA, 25 bp, probe
tcagccccaaggatgtgctggttcg

SEQ ID NO: 3686 - DNA, 25 bp, probe
cagccccaaggatgtgctggttcgc

SEQ ID NO: 3687 - DNA, 25 bp, probe
agccccaaggatgtgctggttcgct

SEQ ID NO: 3688 - DNA, 25 bp, probe
gccccaaggatgtgctggttcgctg

SEQ ID NO: 3689 - DNA, 25 bp, probe
ccccaaggatgtgctggttcgctgg

SEQ ID NO: 3690 - DNA, 25 bp, probe
cccaaggatgtgctggttcgctggc

SEQ ID NO: 3691 - DNA, 25 bp, probe
ccaaggatgtgctggttcgctggct

SEQ ID NO: 3692 - DNA, 25 bp, probe
tgtccaggctggaacaaagcgccag

SEQ ID NO: 3693 - DNA, 25 bp, probe
aaagcgccagtgaactctgactgta

SEQ ID NO: 3694 - DNA, 25 bp, probe
gcgccagtgaactctgactgtatga

SEQ ID NO: 3695 - DNA, 25 bp, probe
ccagtgaactctgactgtatgagat

SEQ ID NO: 3696 - DNA, 25 bp, probe
ttaacatttcctcagtcaagttcag

SEQ ID NO: 3697 - DNA, 25 bp, probe
acatttcctcagtcaagttcagagt

SEQ ID NO: 3698 - DNA, 25 bp, probe
tttcctcagtcaagttcagagtctt

SEQ ID NO: 3699 - DNA, 25 bp, probe
cctcagtcaagttcagagtcttcag

SEQ ID NO: 3700 - DNA, 25 bp, probe
agacatcatcaagtggagagaaatc

SEQ ID NO: 3701 - DNA, 25 bp, probe
attttcccatttggactgtaactga

SEQ ID NO: 3702 - DNA, 25 bp, probe
ttcccatttggactgtaactgactg

SEQ ID NO: 3703 - DNA, 25 bp, probe
ccatttggactgtaactgactgcct

SEQ ID NO: 3704 - DNA, 25 bp, probe
tttggactgtaactgactgccttgc

SEQ ID NO: 3705 - DNA, 25 bp, probe
taactgactgccttgctaaaagatt

SEQ ID NO: 3706 - DNA, 25 bp, probe
ctgactgccttgctaaaagattata

SEQ ID NO: 3707 - DNA, 25 bp, probe
actgccttgctaaaagattatagaa

SEQ ID NO: 3708 - DNA, 25 bp, probe
atgtatacagttgcaagtctggaca

SEQ ID NO: 3709 - DNA, 25 bp, probe
tgtatacagttgcaagtctggacaa

SEQ ID NO: 3710 - DNA, 25 bp, probe
acagttgcaagtctggacaaatgta

SEQ ID NO: 3711 - DNA, 25 bp, probe
cagttgcaagtctggacaaatgtat

SEQ ID NO: 3712 - DNA, 25 bp, probe
tattccaagagtatcccagtattag

SEQ ID NO: 3713 - DNA, 25 bp, probe
attccaagagtatcccagtattagc

SEQ ID NO: 3714 - DNA, 25 bp, probe
ccagtattagcaatactggaatata

SEQ ID NO: 3715 - DNA, 25 bp, probe
taggcacattaccattcatagtaag

SEQ ID NO: 3716 - DNA, 25 bp, probe
agaattctggtgtttacacaaccaa

SEQ ID NO: 3717 - DNA, 25 bp, probe
caaccaaatttgatgcgatctgctc

SEQ ID NO: 3718 - DNA, 25 bp, probe
tgatgcgatctgctcagtaatataa

SEQ ID NO: 3719 - DNA, 25 bp, probe
atttcttcatgtgatgtcatgaaac

SEQ ID NO: 3720 - DNA, 25 bp, probe
ctgtacatactgcagtgtgaatttt

SEQ ID NO: 3721 - DNA, 25 bp, probe
atcttttagtgtttacttcctgcag

SEQ ID NO: 3722 - DNA, 25 bp, probe
cttttagtgtttacttcctgcagtg

SEQ ID NO: 3723 - DNA, 25 bp, probe
gtgtttacttcctgcagtgaatttg

SEQ ID NO: 3724 - DNA, 25 bp, probe
cgagccctgtgctcgggaagtcccg

SEQ ID NO: 3725 - DNA, 25 bp, probe
cctgtgctcgggaagtcccgcagaa

SEQ ID NO: 3726 - DNA, 25 bp, probe
ctgtgctcgggaagtcccgcagaac

SEQ ID NO: 3727 - DNA, 25 bp, probe
tgtgctcgggaagtcccgcagaacg

SEQ ID NO: 3728 - DNA, 25 bp, probe
gtgctcgggaagtcccgcagaacgc

SEQ ID NO: 3729 - DNA, 25 bp, probe
ggaagtcccgcagaacgccggcagc

SEQ ID NO: 3730 - DNA, 25 bp, probe
aagtcccgcagaacgccggcagctg

SEQ ID NO: 3731 - DNA, 25 bp, probe
ttctgccgccgcagcaataaagctc

SEQ ID NO: 3732 - DNA, 25 bp, probe
tgccgccgcagcaataaagctcctt

SEQ ID NO: 3733 - DNA, 25 bp, probe
gccgccgcagcaataaagctccttt

SEQ ID NO: 3734 - DNA, 25 bp, probe
ccgccgcagcaataaagctcctttg

SEQ ID NO: 3735 - DNA, 25 bp, probe
gccgcagcaataaagctcctttgcc

SEQ ID NO: 3736 - DNA, 25 bp, probe
ccgcagcaataaagctcctttgccg

SEQ ID NO: 3737 - DNA, 25 bp, probe
cgcagcaataaagctcctttgccgc

SEQ ID NO: 3738 - DNA, 25 bp, probe
gcagcaataaagctcctttgccgcg

SEQ ID NO: 3739 - DNA, 25 bp, probe
caataaagctcctttgccgcgaaaa

SEQ ID NO: 3740 - DNA, 25 bp, probe
atgatccagaactatgtgctgtgac

SEQ ID NO: 3741 - DNA, 25 bp, probe
gaactatgtgctgtgacgttcgtgg

SEQ ID NO: 3742 - DNA, 25 bp, probe
gaaagcctgtgtctttgagggattc

SEQ ID NO: 3743 - DNA, 25 bp, probe
tgtctttgagggattctaccctgaa

SEQ ID NO: 3744 - DNA, 25 bp, probe
gggattctaccctgaacatacctca

SEQ ID NO: 3745 - DNA, 25 bp, probe
ctgtcatgccacatttcactgattg

SEQ ID NO: 3746 - DNA, 25 bp, probe
catgccacatttcactgattggaat

SEQ ID NO: 3747 - DNA, 25 bp, probe
cacatttcactgattggaatgtgga

SEQ ID NO: 3748 - DNA, 25 bp, probe
aggatgtgcattttcacctgaggtt

SEQ ID NO: 3749 - DNA, 25 bp, probe
gatgtgcattttcacctgaggtttc

SEQ ID NO: 3750 - DNA, 25 bp, probe
tgtgcattttcacctgaggtttccc

SEQ ID NO: 3751 - DNA, 25 bp, probe
attttcacctgaggtttccctgcat

SEQ ID NO: 3752 - DNA, 25 bp, probe
tttcacctgaggtttccctgcatcc

SEQ ID NO: 3753 - DNA, 25 bp, probe
ctgaggtttccctgcatccctgcag

SEQ ID NO: 3754 - DNA, 25 bp, probe
aggtttccctgcatccctgcagtgc

SEQ ID NO: 3755 - DNA, 25 bp, probe
ccaccttcagggaccacctggaatg

SEQ ID NO: 3756 - DNA, 25 bp, probe
tggagacacacttcccagatcaccg

SEQ ID NO: 3757 - DNA, 25 bp, probe
ctgccgggtggcttcttcaatcccg

SEQ ID NO: 3758 - DNA, 25 bp, probe
ttctaatcaggcaggcgtctgtcaa

SEQ ID NO: 3759 - DNA, 25 bp, probe
atcaggcaggcgtctgtcaaccctc

SEQ ID NO: 3760 - DNA, 25 bp, probe
tcaggcaggcgtctgtcaaccctct

SEQ ID NO: 3761 - DNA, 25 bp, probe
tgtggggtcttcttcgggcctccct

SEQ ID NO: 3762 - DNA, 25 bp, probe
cgactccagactctctgcatcaggt

SEQ ID NO: 3763 - DNA, 25 bp, probe
gactccagactctctgcatcaggtc

SEQ ID NO: 3764 - DNA, 25 bp, probe
actccagactctctgcatcaggtct

SEQ ID NO: 3765 - DNA, 25 bp, probe
tgggcggcttaccatagcaagtgat

SEQ ID NO: 3766 - DNA, 25 bp, probe
gcggcttaccatagcaagtgatcct

SEQ ID NO: 3767 - DNA, 25 bp, probe
gcttaccatagcaagtgatcctgcg

SEQ ID NO: 3768 - DNA, 25 bp, probe
catagcaagtgatcctgcgataggg

SEQ ID NO: 3769 - DNA, 25 bp, probe
tgatcctgcgatagggaacgcgccc

SEQ ID NO: 3770 - DNA, 25 bp, probe
ccgaggctgcactaccacaggaaat

SEQ ID NO: 3771 - DNA, 25 bp, probe
aggctgcactaccacaggaaataac

SEQ ID NO: 3772 - DNA, 25 bp, probe
caaaccatgtcagctcgaactccac

SEQ ID NO: 3773 - DNA, 25 bp, probe
atgtcagctcgaactccaccggaag

SEQ ID NO: 3774 - DNA, 25 bp, probe
gcagctagtttcggctctggcctcc

SEQ ID NO: 3775 - DNA, 25 bp, probe
ggctctggcctccaagtccacagtg

SEQ ID NO: 3776 - DNA, 25 bp, probe
ggcctccaagtccacagtggaacca

SEQ ID NO: 3777 - DNA, 25 bp, probe
tggaagtagtggagcccctgctctg

SEQ ID NO: 3778 - DNA, 25 bp, probe
tggatacgacaacttgcacgtattt

SEQ ID NO: 3779 - DNA, 25 bp, probe
ttaatagcgtcataactagaactga

SEQ ID NO: 3780 - DNA, 25 bp, probe
gcgtcataactagaactgaattttg

SEQ ID NO: 3781 - DNA, 25 bp, probe
tgagactttgagggtgtatattttc

SEQ ID NO: 3782 - DNA, 25 bp, probe
ggtgtatattttctgtgcagccact

SEQ ID NO: 3783 - DNA, 25 bp, probe
ctgtgcagccactgttaagccatgt

SEQ ID NO: 3784 - DNA, 25 bp, probe
tgttaagccatgtgttccaaggcat

SEQ ID NO: 3785 - DNA, 25 bp, probe
gccatgtgttccaaggcattttagc

SEQ ID NO: 3786 - DNA, 25 bp, probe
tgtgactcaagacttccagagcctc

SEQ ID NO: 3787 - DNA, 25 bp, probe
tcaagacttccagagcctcaaatga

SEQ ID NO: 3788 - DNA, 25 bp, probe
actgcgggccttggaagtgtccagt

SEQ ID NO: 3789 - DNA, 25 bp, probe
cttggaagtgtccagtggggacact

SEQ ID NO: 3790 - DNA, 25 bp, probe
tcctccctgggacaatagtgtgcat

SEQ ID NO: 3791 - DNA, 25 bp, probe
cctccctgggacaatagtgtgcatg

SEQ ID NO: 3792 - DNA, 25 bp, probe
agtgtgcatgccacccggggtccta

SEQ ID NO: 3793 - DNA, 25 bp, probe
acccggggtcctacaggcaggtgct

SEQ ID NO: 3794 - DNA, 25 bp, probe
aaaggcctggccagcaggtagcctg

SEQ ID NO: 3795 - DNA, 25 bp, probe
cctggccagcaggtagcctgtgtgt

SEQ ID NO: 3796 - DNA, 25 bp, probe
gtagcctgtgtgtttgacaaacagc

SEQ ID NO: 3797 - DNA, 25 bp, probe
gacaaacagcagctggcagcgctgc

SEQ ID NO: 3798 - DNA, 25 bp, probe
tgccacccgacatcaaagctggcgt

SEQ ID NO: 3799 - DNA, 25 bp, probe
acccgacatcaaagctggcgtgtga

SEQ ID NO: 3800 - DNA, 25 bp, probe
cgtgtgacctttccagccatgcgat

SEQ ID NO: 3801 - DNA, 25 bp, probe
tccagccatgcgatattccccttgg

SEQ ID NO: 3802 - DNA, 25 bp, probe
ccagccatgcgatattccccttgga

SEQ ID NO: 3803 - DNA, 25 bp, probe
cctgcacttcaaggatgacaagacc

SEQ ID NO: 3804 - DNA, 25 bp, probe
gtcccggatgttgaggatcccgcaa

SEQ ID NO: 3805 - DNA, 25 bp, probe
tggccctggtccatgcagtgcaggc

SEQ ID NO: 3806 - DNA, 25 bp, probe
cagtgcaggccctctggaaacagtt

SEQ ID NO: 3807 - DNA, 25 bp, probe
ctctggaaacagttccagagtttct

SEQ ID NO: 3808 - DNA, 25 bp, probe
gctctctgtcagagctcttcatgtc

SEQ ID NO: 3809 - DNA, 25 bp, probe
gtcagagctcttcatgtcctctttc

SEQ ID NO: 3810 - DNA, 25 bp, probe
gagctcttcatgtcctctttccagt

SEQ ID NO: 3811 - DNA, 25 bp, probe
tcatgtcctctttccagtcctacgg

SEQ ID NO: 3812 - DNA, 25 bp, probe
atgtcctctttccagtcctacggag

SEQ ID NO: 3813 - DNA, 25 bp, probe
aggaggagctgacaccccagaagtg

SEQ ID NO: 3814 - DNA, 25 bp, probe
agctgacaccccagaagtgctctga

SEQ ID NO: 3815 - DNA, 25 bp, probe
ctgacaccccagaagtgctctgaac

SEQ ID NO: 3816 - DNA, 25 bp, probe
tgacaccccagaagtgctctgaacc

SEQ ID NO: 3817 - DNA, 25 bp, probe
agaagtgctctgaaccccaatcctc

SEQ ID NO: 3818 - DNA, 25 bp, probe
gaagtgctctgaaccccaatcctca

SEQ ID NO: 3819 - DNA, 25 bp, probe
atgaagatactgacaccacctttgc

SEQ ID NO: 3820 - DNA, 25 bp, probe
gaaagctttcccaattgcacttgca

SEQ ID NO: 3821 - DNA, 25 bp, probe
tgtttatgaaagtcctgcacagttt

SEQ ID NO: 3822 - DNA, 25 bp, probe
tgaaagtcctgcacagtttcaaagg

SEQ ID NO: 3823 - DNA, 25 bp, probe
ttatgtagtctgttacagaaacagc

SEQ ID NO: 3824 - DNA, 25 bp, probe
agtctgttacagaaacagctataga

SEQ ID NO: 3825 - DNA, 25 bp, probe
ttatccagtgaagagcaaaattcaa

SEQ ID NO: 3826 - DNA, 25 bp, probe
ttttgtacagtctgtgggcatttac

SEQ ID NO: 3827 - DNA, 25 bp, probe
tttgtacagtctgtgggcatttaca

SEQ ID NO: 3828 - DNA, 25 bp, probe
cagtctgtgggcatttacacatttt

SEQ ID NO: 3829 - DNA, 25 bp, probe
tctgtgggcatttacacatttttaa

SEQ ID NO: 3830 - DNA, 25 bp, probe
cttctagttatgatttgtgaattcc

SEQ ID NO: 3831 - DNA, 25 bp, probe
atgatttgtgaattccctaagacct

SEQ ID NO: 3832 - DNA, 25 bp, probe
tgaattccctaagaccttggatttt

SEQ ID NO: 3833 - DNA, 25 bp, probe
ttgtattgctgctcaagaatggtac

SEQ ID NO: 3834 - DNA, 25 bp, probe
tgtattgctgctcaagaatggtacc

SEQ ID NO: 3835 - DNA, 25 bp, probe
tggtaccctcttgtcaaaaaggcat

SEQ ID NO: 3836 - DNA, 25 bp, probe
ccgtagccctcacgtgggtgtgaag

SEQ ID NO: 3837 - DNA, 25 bp, probe
gggaaggacacttctgccatgataa

SEQ ID NO: 3838 - DNA, 25 bp, probe
ccatgataaccagacctgctgccga

SEQ ID NO: 3839 - DNA, 25 bp, probe
ataaccagacctgctgccgagacaa

SEQ ID NO: 3840 - DNA, 25 bp, probe
taaccagacctgctgccgagacaac

SEQ ID NO: 3841 - DNA, 25 bp, probe
gcgtctgttgtgctgatcggcgcca

SEQ ID NO: 3842 - DNA, 25 bp, probe
ctgttgtgctgatcggcgccactgc

SEQ ID NO: 3843 - DNA, 25 bp, probe
tgggacgcccctttgagggacccag

SEQ ID NO: 3844 - DNA, 25 bp, probe
ggacccagccttgagacagctgctg

SEQ ID NO: 3845 - DNA, 25 bp, probe
gacagtactgaagactctgcagccc

SEQ ID NO: 3846 - DNA, 25 bp, probe
actgaagactctgcagccctcggga

SEQ ID NO: 3847 - DNA, 25 bp, probe
tgaagactctgcagccctcgggacc

SEQ ID NO: 3848 - DNA, 25 bp, probe
gtggggcctcaatctaaggccttcc

SEQ ID NO: 3849 - DNA, 25 bp, probe
gggcctcaatctaaggccttccctg

SEQ ID NO: 3850 - DNA, 25 bp, probe
ggcctcaatctaaggccttccctgt

SEQ ID NO: 3851 - DNA, 25 bp, probe
ttttccctatccacaggggtgtttg

SEQ ID NO: 3852 - DNA, 25 bp, probe
ctgacttttgttaaattcagtaatg

SEQ ID NO: 3853 - DNA, 25 bp, probe
tttaaaaacctgtatctgacccact

SEQ ID NO: 3854 - DNA, 25 bp, probe
tccattctgtagacttttgaaaaaa

SEQ ID NO: 3855 - DNA, 25 bp, probe
agtttttaatttgatgcccaatata

SEQ ID NO: 3856 - DNA, 25 bp, probe
tattctgaccgttaaaaaattcttg

SEQ ID NO: 3857 - DNA, 25 bp, probe
ttaaaaaattcttgttcatatggga

SEQ ID NO: 3858 - DNA, 25 bp, probe
tcatatgggagaagggggagtaatg

SEQ ID NO: 3859 - DNA, 25 bp, probe
gtaatgacttgtacaaacagtattt

SEQ ID NO: 3860 - DNA, 25 bp, probe
ttgtacaaacagtatttctggtgta

SEQ ID NO: 3861 - DNA, 25 bp, probe
ctttttattttgcactctgtaattg

SEQ ID NO: 3862 - DNA, 25 bp, probe
attttgcactctgtaattgcacttt

SEQ ID NO: 3863 - DNA, 25 bp, probe
ttgcactctgtaattgcacttttta

SEQ ID NO: 3864 - DNA, 25 bp, probe
cactctgtaattgcactttttaagt

SEQ ID NO: 3865 - DNA, 25 bp, probe
aattgcactttttaagtttgaagag

SEQ ID NO: 3866 - DNA, 25 bp, probe
attgcactttttaagtttgaagagc

SEQ ID NO: 3867 - DNA, 25 bp, probe
gtttgaagagccattttggtaaacg

SEQ ID NO: 3868 - DNA, 25 bp, probe
gacatcttcctgcttattagagcat

SEQ ID NO: 3869 - DNA, 25 bp, probe
gcatccctagcaacaaggctaaacc

SEQ ID NO: 3870 - DNA, 25 bp, probe
tagcaacaaggctaaaccttcatga

SEQ ID NO: 3871 - DNA, 25 bp, probe
ccttcatgacagtgctggcaggtgg

SEQ ID NO: 3872 - DNA, 25 bp, probe
taaagttcagtgaggtaggccagct

SEQ ID NO: 3873 - DNA, 25 bp, probe
aggtaggccagcttttatgacgcac

SEQ ID NO: 3874 - DNA, 25 bp, probe
gaagcatatgcctctatttttcctg

SEQ ID NO: 3875 - DNA, 25 bp, probe
gcctctatttttcctgtccccagtg

SEQ ID NO: 3876 - DNA, 25 bp, probe
ctatttttcctgtccccagtgctgg

SEQ ID NO: 3877 - DNA, 25 bp, probe
ccagtgctgggcttcgtcacatacc

SEQ ID NO: 3878 - DNA, 25 bp, probe
gtcacataccaacatttctgggcct

SEQ ID NO: 3879 - DNA, 25 bp, probe
catttctgggcctttaccaacagca

SEQ ID NO: 3880 - DNA, 25 bp, probe
attttagctcagaaggctcgcttac

SEQ ID NO: 3881 - DNA, 25 bp, probe
tacctgtaatttgacctaatcttgg

SEQ ID NO: 3882 - DNA, 25 bp, probe
ctgtaatttgacctaatcttgggat

SEQ ID NO: 3883 - DNA, 25 bp, probe
cctaatcttgggataaactgttagg

SEQ ID NO: 3884 - DNA, 25 bp, probe
gtggcatcaacaattatacccagca

SEQ ID NO: 3885 - DNA, 25 bp, probe
tttctgcatgactctttccagaatg

SEQ ID NO: 3886 - DNA, 25 bp, probe
gtctgtgatttgctcagcattgtct

SEQ ID NO: 3887 - DNA, 25 bp, probe
gatttgctcagcattgtctgcaaaa

SEQ ID NO: 3888 - DNA, 25 bp, probe
gctcagcattgtctgcaaaaatcgt

SEQ ID NO: 3889 - DNA, 25 bp, probe
ctcagcattgtctgcaaaaatcgtc

SEQ ID NO: 3890 - DNA, 25 bp, probe
gctatagtgctgctgcccagtacaa

SEQ ID NO: 3891 - DNA, 25 bp, probe
gctgcccagtacaaattcttcattg

SEQ ID NO: 3892 - DNA, 25 bp, probe
attcttcattgttgcctgtgacccc

SEQ ID NO: 3893 - DNA, 25 bp, probe
ccctacaagttggttcctgtacact

SEQ ID NO: 3894 - DNA, 25 bp, probe
atagtattctctaaggcatccactg

SEQ ID NO: 3895 - DNA, 25 bp, probe
ggagaattcgagtgcctaggatgcc

SEQ ID NO: 3896 - DNA, 25 bp, probe
ccagaccagagttgagacaaaaaga

SEQ ID NO: 3897 - DNA, 25 bp, probe
gctttgtagttctgtacttttcgag

SEQ ID NO: 3898 - DNA, 25 bp, probe
ctttgtagttctgtacttttcgaga

SEQ ID NO: 3899 - DNA, 25 bp, probe
gcaacttttgccaagctttattgcc

SEQ ID NO: 3900 - DNA, 25 bp, probe
aaagtgctatctgacgttgttatcc

SEQ ID NO: 3901 - DNA, 25 bp, probe
tgacgttgttatcctgtttttgcaa

SEQ ID NO: 3902 - DNA, 25 bp, probe
gacgttgttatcctgtttttgcaaa

SEQ ID NO: 3903 - DNA, 25 bp, probe
cagaccattgtttctaataagcaga

SEQ ID NO: 3904 - DNA, 25 bp, probe
ccattgtttctaataagcagagaga

SEQ ID NO: 3905 - DNA, 25 bp, probe
tgtgagcttcagattttgtgaactc

SEQ ID NO: 3906 - DNA, 25 bp, probe
actccagatgttgtgcggtgttttt

SEQ ID NO: 3907 - DNA, 25 bp, probe
tgtacactggaactgtagtggtagc

SEQ ID NO: 3908 - DNA, 25 bp, probe
cactggaactgtagtggtagctttc

SEQ ID NO: 3909 - DNA, 25 bp, probe
tgttctatacggacctttttgctgt

SEQ ID NO: 3910 - DNA, 25 bp, probe
gtttatcctgtatgtaataaagtcc

SEQ ID NO: 3911 - DNA, 25 bp, probe
gcaactgaatcttcagcatgttctc

SEQ ID NO: 3912 - DNA, 25 bp, probe
gccttcttgtgtaatgtaaactgtg

SEQ ID NO: 3913 - DNA, 25 bp, probe
ggaagaagccatacctgtacaagac

SEQ ID NO: 3914 - DNA, 25 bp, probe
tacctgtacaagaccgggctcttga

SEQ ID NO: 3915 - DNA, 25 bp, probe
ccagcccgtgtaagaacagaaggct

SEQ ID NO: 3916 - DNA, 25 bp, probe
ctgtctacctgagagaatgagcacc

SEQ ID NO: 3917 - DNA, 25 bp, probe
gctgccttgataccagctctctgtg

SEQ ID NO: 3918 - DNA, 25 bp, probe
ctctctgtggaaacccccgaggagt

SEQ ID NO: 3919 - DNA, 25 bp, probe
aacccccgaggagttggatctggag

SEQ ID NO: 3920 - DNA, 25 bp, probe
cccgaggagttggatctggagaaca

SEQ ID NO: 3921 - DNA, 25 bp, probe
actgaggatgatttccctaatgctt

SEQ ID NO: 3922 - DNA, 25 bp, probe
gagctgctccttccttacagccttg

SEQ ID NO: 3923 - DNA, 25 bp, probe
gctccttccttacagccttggggat

SEQ ID NO: 3924 - DNA, 25 bp, probe
cctgagccctgtgagaggcacgact

SEQ ID NO: 3925 - DNA, 25 bp, probe
tgagaggcacgactgtctatgccaa

SEQ ID NO: 3926 - DNA, 25 bp, probe
actgtctatgccaatgaggctcggt

SEQ ID NO: 3927 - DNA, 25 bp, probe
ctcaagtgcctgatcctgccctggg

SEQ ID NO: 3928 - DNA, 25 bp, probe
cagagccagcccagagggaagcaac

SEQ ID NO: 3929 - DNA, 25 bp, probe
cagcccagagggaagcaactgcaca

SEQ ID NO: 3930 - DNA, 25 bp, probe
caaccccatctcagagctcagaggg

SEQ ID NO: 3931 - DNA, 25 bp, probe
tcagagggtacaagctccagaacag

SEQ ID NO: 3932 - DNA, 25 bp, probe
ggagtggagcctgcggcttaatttg

SEQ ID NO: 3933 - DNA, 25 bp, probe
cccggacacggacaggattgacaga

SEQ ID NO: 3934 - DNA, 25 bp, probe
gtggtggtgcatggccgttcttagt

SEQ ID NO: 3935 - DNA, 25 bp, probe
agcgatttgtctggttaattccgat

SEQ ID NO: 3936 - DNA, 25 bp, probe
taattccgataacgaacgagactct

SEQ ID NO: 3937 - DNA, 25 bp, probe
cgaacgagactctggcatgctaact

SEQ ID NO: 3938 - DNA, 25 bp, probe
ctctggcatgctaactagttacgcg

SEQ ID NO: 3939 - DNA, 25 bp, probe
gggacaagtggcgttcagccacccg

SEQ ID NO: 3940 - DNA, 25 bp, probe
gttcagccacccgagattgagcaat

SEQ ID NO: 3941 - DNA, 25 bp, probe
caggtctgtgatgcccttagatgtc

SEQ ID NO: 3942 - DNA, 25 bp, probe
gcccttagatgtccggggctgcacg

SEQ ID NO: 3943 - DNA, 25 bp, probe
cacgcgcgctacactgactggctca

SEQ ID NO: 3944 - DNA, 25 bp, probe
actgactggctcagcgtgtgcctac

SEQ ID NO: 3945 - DNA, 25 bp, probe
agcgtgtgcctaccctacgccggca

SEQ ID NO: 3946 - DNA, 25 bp, probe
attgcaattattccccatgaacgag

SEQ ID NO: 3947 - DNA, 25 bp, probe
ggaattcccagtaagtgcgggtcat

SEQ ID NO: 3948 - DNA, 25 bp, probe
aagtgcgggtcataagcttgcgttg

SEQ ID NO: 3949 - DNA, 25 bp, probe
gggtcataagcttgcgttgattaag

SEQ ID NO: 3950 - DNA, 25 bp, probe
ccgtcgctactaccgattggatggt

SEQ ID NO: 3951 - DNA, 25 bp, probe
tgagaagacggtcgaacttgactat

SEQ ID NO: 3952 - DNA, 25 bp, probe
gctttcaccttactctatggactcg

SEQ ID NO: 3953 - DNA, 25 bp, probe
actcgccctgaattctttcttgtgc

SEQ ID NO: 3954 - DNA, 25 bp, probe
ctcgccctgaattctttcttgtgca

SEQ ID NO: 3955 - DNA, 25 bp, probe
gatcgggacctctttcctgtaacac

SEQ ID NO: 3956 - DNA, 25 bp, probe
cctctttcctgtaacactgggaggc

SEQ ID NO: 3957 - DNA, 25 bp, probe
tgtaacactgggaggccaatgtgtg

SEQ ID NO: 3958 - DNA, 25 bp, probe
gaattactcaaaatgatctaggttc

SEQ ID NO: 3959 - DNA, 25 bp, probe
atgatctaggttcatttgtttcgac

SEQ ID NO: 3960 - DNA, 25 bp, probe
atctaggttcatttgtttcgacata

SEQ ID NO: 3961 - DNA, 25 bp, probe
ggttcatttgtttcgacatacctta

SEQ ID NO: 3962 - DNA, 25 bp, probe
gtttcgacataccttataaagcaag

SEQ ID NO: 3963 - DNA, 25 bp, probe
cataccttataaagcaagccacagg

SEQ ID NO: 3964 - DNA, 25 bp, probe
aaagcaagccacagggttgtctgaa

SEQ ID NO: 3965 - DNA, 25 bp, probe
tcccaccagctctgcctatggaata

SEQ ID NO: 3966 - DNA, 25 bp, probe
accagctctgcctatggaatagtca

SEQ ID NO: 3967 - DNA, 25 bp, probe
ccagctctgcctatggaatagtcat

SEQ ID NO: 3968 - DNA, 25 bp, probe
ttctgcaggggccttgtctctcact

SEQ ID NO: 3969 - DNA, 25 bp, probe
aggggccttgtctctcactgcattt

SEQ ID NO: 3970 - DNA, 25 bp, probe
cttgtctctcactgcatttggtcag

SEQ ID NO: 3971 - DNA, 25 bp, probe
ggacctgaggcaagacgagcacacc

SEQ ID NO: 3972 - DNA, 25 bp, probe
agacgagcacaccaggagagagctg

SEQ ID NO: 3973 - DNA, 25 bp, probe
ggcgaaccggatcagtgcctttggc

SEQ ID NO: 3974 - DNA, 25 bp, probe
tgagatggccactcgggctggcctc

SEQ ID NO: 3975 - DNA, 25 bp, probe
ggccactcgggctggcctccaggtc

SEQ ID NO: 3976 - DNA, 25 bp, probe
cagcctcctgagggctccatactga

SEQ ID NO: 3977 - DNA, 25 bp, probe
cctgagggctccatactgaaggctc

SEQ ID NO: 3978 - DNA, 25 bp, probe
cagcgctctgggagccacgcctatg

SEQ ID NO: 3979 - DNA, 25 bp, probe
ccccaaaggatggtcacacaccagc

SEQ ID NO: 3980 - DNA, 25 bp, probe
gtcacacaccagcactttatacact

SEQ ID NO: 3981 - DNA, 25 bp, probe
caccagcactttatacacttctggc

SEQ ID NO: 3982 - DNA, 25 bp, probe
ctcacaggaaagtgtctgcagtagg

SEQ ID NO: 3983 - DNA, 25 bp, probe
ccaggcccctggagttgtttctgca

SEQ ID NO: 3984 - DNA, 25 bp, probe
aaatgcttcactgtacgtagttaag

SEQ ID NO: 3985 - DNA, 25 bp, probe
aatgcttcactgtacgtagttaagt

SEQ ID NO: 3986 - DNA, 25 bp, probe
cactgtacgtagttaagtcgtagct

SEQ ID NO: 3987 - DNA, 25 bp, probe
ctgtacgtagttaagtcgtagctat

SEQ ID NO: 3988 - DNA, 25 bp, probe
tatttgtaaggcttgttccaatgcc

SEQ ID NO: 3989 - DNA, 25 bp, probe
atttgtaaggcttgttccaatgcca

SEQ ID NO: 3990 - DNA, 25 bp, probe
gtaaggcttgttccaatgccacata

SEQ ID NO: 3991 - DNA, 25 bp, probe
aggcttgttccaatgccacatactt

SEQ ID NO: 3992 - DNA, 25 bp, probe
ggcttgttccaatgccacatacttg

SEQ ID NO: 3993 - DNA, 25 bp, probe
tgttccaatgccacatacttgcagc

SEQ ID NO: 3994 - DNA, 25 bp, probe
gttccaatgccacatacttgcagct

SEQ ID NO: 3995 - DNA, 25 bp, probe
cttgcagctcccattctatgtgtca

SEQ ID NO: 3996 - DNA, 25 bp, probe
gcagctcccattctatgtgtcatca

SEQ ID NO: 3997 - DNA, 25 bp, probe
cccattctatgtgtcatcaatagtg

SEQ ID NO: 3998 - DNA, 25 bp, probe
cattctatgtgtcatcaatagtgtc

SEQ ID NO: 3999 - DNA, 25 bp, probe
atgtgtcatcaatagtgtcctatgc

SEQ ID NO: 4000 - DNA, 25 bp, probe
ggcgggcaacgaattccaggtgtcc

SEQ ID NO: 4001 - DNA, 25 bp, probe
tccctgagcagctccatgtcggtgt

SEQ ID NO: 4002 - DNA, 25 bp, probe
tccatgtcggtgtcagagctgaagg

SEQ ID NO: 4003 - DNA, 25 bp, probe
agctgaaggcgcagatcacccagaa

SEQ ID NO: 4004 - DNA, 25 bp, probe
agaggcagcgaactcatctttgcca

SEQ ID NO: 4005 - DNA, 25 bp, probe
acgccttccagcagcgtctggctgt

SEQ ID NO: 4006 - DNA, 25 bp, probe
gcgtctggctgtccacccgagcggt

SEQ ID NO: 4007 - DNA, 25 bp, probe
ggacaaatgcgacgaacctctgagc

SEQ ID NO: 4008 - DNA, 25 bp, probe
cgaacctctgagcatcctggtgagg

SEQ ID NO: 4009 - DNA, 25 bp, probe
gaccgtggcccacctgaagcagcaa

SEQ ID NO: 4010 - DNA, 25 bp, probe
acctgaagcagcaagtgagcgggct

SEQ ID NO: 4011 - DNA, 25 bp, probe
gacgacctgttctggctgaccttcg

SEQ ID NO: 4012 - DNA, 25 bp, probe
ctggctgaccttcgaggggaagccc

SEQ ID NO: 4013 - DNA, 25 bp, probe
agtacggcctcaagcccctgagcac

SEQ ID NO: 4014 - DNA, 25 bp, probe
tgagcaccgtgttcatgaatctgcg

SEQ ID NO: 4015 - DNA, 25 bp, probe
ctccaccagcatccgagcaggatca

SEQ ID NO: 4016 - DNA, 25 bp, probe
gagtggcctgaagagtcctctgaat

SEQ ID NO: 4017 - DNA, 25 bp, probe
agtcctctgaatgaaccttctggcc

SEQ ID NO: 4018 - DNA, 25 bp, probe
cagactcaaatgctcagaccagctc

SEQ ID NO: 4019 - DNA, 25 bp, probe
accaggccttatctccaagaccaga

SEQ ID NO: 4020 - DNA, 25 bp, probe
cggacatcagctggtcaaacaaact

SEQ ID NO: 4021 - DNA, 25 bp, probe
gtcaaacaaactctctgaacccctc

SEQ ID NO: 4022 - DNA, 25 bp, probe
tttcttcactgtcctccaagccagc

SEQ ID NO: 4023 - DNA, 25 bp, probe
caagccagcgggaatggcagctgcc

SEQ ID NO: 4024 - DNA, 25 bp, probe
cgcgtgatcaaagccacactctggg

SEQ ID NO: 4025 - DNA, 25 bp, probe
ggatgacatgcactcagctcttggc

SEQ ID NO: 4026 - DNA, 25 bp, probe
cgcccaaggccacgagcttgttctt

SEQ ID NO: 4027 - DNA, 25 bp, probe
tctttgttctttgtcacagggactg

SEQ ID NO: 4028 - DNA, 25 bp, probe
ggactgaaaacctctcctcatgttc

SEQ ID NO: 4029 - DNA, 25 bp, probe
cctcatgttctgctttcgattcgtt

SEQ ID NO: 4030 - DNA, 25 bp, probe
ctttcgattcgttaagagagcaaca

SEQ ID NO: 4031 - DNA, 25 bp, probe
tttacccacacacagataaagtttt

SEQ ID NO: 4032 - DNA, 25 bp, probe
taagatgatctgtgccggctacagg

SEQ ID NO: 4033 - DNA, 25 bp, probe
ttcgggaggccctctgtcctgcaaa

SEQ ID NO: 4034 - DNA, 25 bp, probe
ccctctgtcctgcaaacacaatgag

SEQ ID NO: 4035 - DNA, 25 bp, probe
caaacacaatgaggtctggcatctg

SEQ ID NO: 4036 - DNA, 25 bp, probe
ggtctggcatctggtaggcatcacg

SEQ ID NO: 4037 - DNA, 25 bp, probe
catctggtaggcatcacgagctggg

SEQ ID NO: 4038 - DNA, 25 bp, probe
ttcccaggggccattggagtccctg

SEQ ID NO: 4039 - DNA, 25 bp, probe
ggagtccctgaaggacccaggattt

SEQ ID NO: 4040 - DNA, 25 bp, probe
cctgaaggacccaggatttgctggg

SEQ ID NO: 4041 - DNA, 25 bp, probe
ctgaaggacccaggatttgctggga

SEQ ID NO: 4042 - DNA, 25 bp, probe
agggtgttgagttcactgtgccagc

SEQ ID NO: 4043 - DNA, 25 bp, probe
cagtaacacgctgaaggggcttggt

SEQ ID NO: 4044 - DNA, 25 bp, probe
caaactgtcacaagttgttatgtcc

SEQ ID NO: 4045 - DNA, 25 bp, probe
gtcacaagttgttatgtccaaaact

SEQ ID NO: 4046 - DNA, 25 bp, probe
aaactcccgttctatgatcgttgta

SEQ ID NO: 4047 - DNA, 25 bp, probe
tagtttgtttgagcattcagtctct

SEQ ID NO: 4048 - DNA, 25 bp, probe
ctctgcaggatattatccaggagaa

SEQ ID NO: 4049 - DNA, 25 bp, probe
tctgcaggatattatccaggagaac

SEQ ID NO: 4050 - DNA, 25 bp, probe
gatattatccaggagaacttcccta

SEQ ID NO: 4051 - DNA, 25 bp, probe
acattcaaattcaggaaatacagag

SEQ ID NO: 4052 - DNA, 25 bp, probe
acagagaatgccacaaagatactcc

SEQ ID NO: 4053 - DNA, 25 bp, probe
gatactcctcaagaagagcaactcc

SEQ ID NO: 4054 - DNA, 25 bp, probe
agaagagcaactccatatctatgtt

SEQ ID NO: 4055 - DNA, 25 bp, probe
gagcaactccatatctatgtttttg

SEQ ID NO: 4056 - DNA, 25 bp, probe
ctccatatctatgtttttgaatggt

SEQ ID NO: 4057 - DNA, 25 bp, probe
gtttttgaatggtgtcctgagttcc

SEQ ID NO: 4058 - DNA, 25 bp, probe
ggaaaagaccaaatctacgtctgat

SEQ ID NO: 4059 - DNA, 25 bp, probe
ccaaatctacgtctgattggtgtac

SEQ ID NO: 4060 - DNA, 25 bp, probe
aatctacgtctgattggtgtacctg

SEQ ID NO: 4061 - DNA, 25 bp, probe
atctacgtctgattggtgtacctga

SEQ ID NO: 4062 - DNA, 25 bp, probe
agttggaaaacactctgcaggatat

SEQ ID NO: 4063 - DNA, 25 bp, probe
ttggaaaacactctgcaggatatta

SEQ ID NO: 4064 - DNA, 25 bp, probe
gcagccagtgattgggatcagccag

SEQ ID NO: 4065 - DNA, 25 bp, probe
gagatgcagcgaatcactctgccct

SEQ ID NO: 4066 - DNA, 25 bp, probe
gcagcgaatcactctgcccttgtct

SEQ ID NO: 4067 - DNA, 25 bp, probe
agcgaatcactctgcccttgtctgc

SEQ ID NO: 4068 - DNA, 25 bp, probe
cccacctgtgagattgtggatgaga

SEQ ID NO: 4069 - DNA, 25 bp, probe
ccacctgtgagattgtggatgagaa

SEQ ID NO: 4070 - DNA, 25 bp, probe
atgagaagactgtcgtggtccacac

SEQ ID NO: 4071 - DNA, 25 bp, probe
gaagactgtcgtggtccacaccagc

SEQ ID NO: 4072 - DNA, 25 bp, probe
tgtcgtggtccacaccagccagact

SEQ ID NO: 4073 - DNA, 25 bp, probe
ccagactccagttgaccctcaggag

SEQ ID NO: 4074 - DNA, 25 bp, probe
agactccagttgaccctcaggaggg

SEQ ID NO: 4075 - DNA, 25 bp, probe
ccccagtgggcaggagcccatgcag

SEQ ID NO: 4076 - DNA, 25 bp, probe
ccagtgggcaggagcccatgcagac

SEQ ID NO: 4077 - DNA, 25 bp, probe
accctcctacagctaggaggaacta

SEQ ID NO: 4078 - DNA, 25 bp, probe
ccctcctacagctaggaggaactac

SEQ ID NO: 4079 - DNA, 25 bp, probe
gaactaccactttgtgttctggtta

SEQ ID NO: 4080 - DNA, 25 bp, probe
agaaggtcattctgtgcctgaaatt

SEQ ID NO: 4081 - DNA, 25 bp, probe
gaaggtcattctgtgcctgaaatta

SEQ ID NO: 4082 - DNA, 25 bp, probe
attaattcggataccgacaaatcag

SEQ ID NO: 4083 - DNA, 25 bp, probe
ttcggataccgacaaatcagaaacc

SEQ ID NO: 4084 - DNA, 25 bp, probe
ttgtagttacttcatatactctagg

SEQ ID NO: 4085 - DNA, 25 bp, probe
caatgcagacagtctgaaaaagaga

SEQ ID NO: 4086 - DNA, 25 bp, probe
aatttgaggaacctttgctacaaga

SEQ ID NO: 4087 - DNA, 25 bp, probe
ctacaagaaattccaggagaattta

SEQ ID NO: 4088 - DNA, 25 bp, probe
ggacctctggccaaatggtacatgt

SEQ ID NO: 4089 - DNA, 25 bp, probe
cctctggccaaatggtacatgtact

SEQ ID NO: 4090 - DNA, 25 bp, probe
ccaaatggtacatgtactggaagtg

SEQ ID NO: 4091 - DNA, 25 bp, probe
gtacatgtactggaagtggataacc

SEQ ID NO: 4092 - DNA, 25 bp, probe
acatgtactggaagtggataaccag

SEQ ID NO: 4093 - DNA, 25 bp, probe
gtggataaccagtatcacttacaca

SEQ ID NO: 4094 - DNA, 25 bp, probe
tcctgtttctccagaatgagaattt

SEQ ID NO: 4095 - DNA, 25 bp, probe
ttctccagaatgagaatttgtgtac

SEQ ID NO: 4096 - DNA, 25 bp, probe
agacctgctgaaagggtcgctcctc

SEQ ID NO: 4097 - DNA, 25 bp, probe
gtttggcttccctgcattcagcggc

SEQ ID NO: 4098 - DNA, 25 bp, probe
tgtctgccactttggaagagcgaaa

SEQ ID NO: 4099 - DNA, 25 bp, probe
ccactttggaagagcgaaaggaaga

SEQ ID NO: 4100 - DNA, 25 bp, probe
agaagaaaagtccactgtcatggat

SEQ ID NO: 4101 - DNA, 25 bp, probe
gaagaaaagtccactgtcatggatt

SEQ ID NO: 4102 - DNA, 25 bp, probe
aaagtccactgtcatggattgaaga

SEQ ID NO: 4103 - DNA, 25 bp, probe
gtccactgtcatggattgaagaaaa

SEQ ID NO: 4104 - DNA, 25 bp, probe
atttaagcttccatttcaagtctgg

SEQ ID NO: 4105 - DNA, 25 bp, probe
ttccatttcaagtctgggtccttgg

SEQ ID NO: 4106 - DNA, 25 bp, probe
agtctgggtccttggagaatgtgcc

SEQ ID NO: 4107 - DNA, 25 bp, probe
ggtccttggagaatgtgccaaatgt

SEQ ID NO: 4108 - DNA, 25 bp, probe
tccttggagaatgtgccaaatgtag

SEQ ID NO: 4109 - DNA, 25 bp, probe
atatatttgtccagaaactcttggg

SEQ ID NO: 4110 - DNA, 25 bp, probe
tatatttgtccagaaactcttgggc

SEQ ID NO: 4111 - DNA, 25 bp, probe
gaaacgcatcctgcactgcctgggg

SEQ ID NO: 4112 - DNA, 25 bp, probe
tgcatcttctgaggtcaattaaaag

SEQ ID NO: 4113 - DNA, 25 bp, probe
acaatttctcactttgcatttagtc

SEQ ID NO: 4114 - DNA, 25 bp, probe
catgaaatgcttctttctcagttta

SEQ ID NO: 4115 - DNA, 25 bp, probe
ataattagtttagtttgtggcttca

SEQ ID NO: 4116 - DNA, 25 bp, probe
tagtttgtggcttcatggaaactcc

SEQ ID NO: 4117 - DNA, 25 bp, probe
aagcttcagggttatgtctatgttc

SEQ ID NO: 4118 - DNA, 25 bp, probe
agagcaatgagcattccgatgtgat

SEQ ID NO: 4119 - DNA, 25 bp, probe
agcattccgatgtgattgatagtca

SEQ ID NO: 4120 - DNA, 25 bp, probe
tcaggaactttccaaagtcagccgt

SEQ ID NO: 4121 - DNA, 25 bp, probe
agccgtgaattccacagccatgaat

SEQ ID NO: 4122 - DNA, 25 bp, probe
attccacagccatgaatttcacagc

SEQ ID NO: 4123 - DNA, 25 bp, probe
ccatgaatttcacagccatgaagat

SEQ ID NO: 4124 - DNA, 25 bp, probe
acagccatgaagatatgctggttgt

SEQ ID NO: 4125 - DNA, 25 bp, probe
atgctggttgtagaccccaaaagta

SEQ ID NO: 4126 - DNA, 25 bp, probe
acctgaaatttcgtatttctcatga

SEQ ID NO: 4127 - DNA, 25 bp, probe
attagatagtgcatcttctgaggtc

SEQ ID NO: 4128 - DNA, 25 bp, probe
gtggctcctgttgtcttgcgctctg

SEQ ID NO: 4129 - DNA, 25 bp, probe
cgctctgggaagtcagatgtcattt

SEQ ID NO: 4130 - DNA, 25 bp, probe
tcagatgtcatttcaggcctgcagt

SEQ ID NO: 4131 - DNA, 25 bp, probe
atcctcccatcgatgtgccacgtgg

SEQ ID NO: 4132 - DNA, 25 bp, probe
cacgtgggtgtcacgtgtcccagat

SEQ ID NO: 4133 - DNA, 25 bp, probe
cccagatgcagtattcggcagccag

SEQ ID NO: 4134 - DNA, 25 bp, probe
ccaccttggggcttctcatgggaaa

SEQ ID NO: 4135 - DNA, 25 bp, probe
accttggggcttctcatgggaaatg

SEQ ID NO: 4136 - DNA, 25 bp, probe
gcttctcatgggaaatgtgcccccg

SEQ ID NO: 4137 - DNA, 25 bp, probe
tcggctttactcctgcccagtgact

SEQ ID NO: 4138 - DNA, 25 bp, probe
cggctttactcctgcccagtgactg

SEQ ID NO: 4139 - DNA, 25 bp, probe
ttactcctgcccagtgactgtgacc

SEQ ID NO: 4140 - DNA, 25 bp, probe
actgtgaccactgtccgtgttgcct

SEQ ID NO: 4141 - DNA, 25 bp, probe
ttcaccaaaggtcttggtacaacca

SEQ ID NO: 4142 - DNA, 25 bp, probe
tcttggtacaaccagctgcccattt

SEQ ID NO: 4143 - DNA, 25 bp, probe
accagctgcccattttgtgaaattt

SEQ ID NO: 4144 - DNA, 25 bp, probe
tccctagttcggaaattcaagctaa

SEQ ID NO: 4145 - DNA, 25 bp, probe
tttaaactgtcactgcatatgcaag

SEQ ID NO: 4146 - DNA, 25 bp, probe
cgctctaatttttggatcattaaag

SEQ ID NO: 4147 - DNA, 25 bp, probe
aggtaacaaaacaaccacctgatag

SEQ ID NO: 4148 - DNA, 25 bp, probe
accacctgatagtaagttttctgat

SEQ ID NO: 4149 - DNA, 25 bp, probe
agaggtaatcaattcttccgaagtg

SEQ ID NO: 4150 - DNA, 25 bp, probe
caatgtatttccttcatgagtaaag

SEQ ID NO: 4151 - DNA, 25 bp, probe
agtatagattccagtagcctagttt

SEQ ID NO: 4152 - DNA, 25 bp, probe
cagcacgataacaccatgacgccta

SEQ ID NO: 4153 - DNA, 25 bp, probe
gataacaccatgacgcctactgctg

SEQ ID NO: 4154 - DNA, 25 bp, probe
accttgggattctgtgtgctgccat

SEQ ID NO: 4155 - DNA, 25 bp, probe
ctgtcaggcagcagcgaaagcttgt

SEQ ID NO: 4156 - DNA, 25 bp, probe
agcgaaagcttgttaggatgtcctg

SEQ ID NO: 4157 - DNA, 25 bp, probe
ttaggatgtcctgtgctgcttgtga

SEQ ID NO: 4158 - DNA, 25 bp, probe
atgagagcctccacactgtactgtt

SEQ ID NO: 4159 - DNA, 25 bp, probe
gcctccacactgtactgttcaagtc

SEQ ID NO: 4160 - DNA, 25 bp, probe
gtgactgcatcctccagcattctca

SEQ ID NO: 4161 - DNA, 25 bp, probe
tccagcattctcaactccgtctgtc

SEQ ID NO: 4162 - DNA, 25 bp, probe
gtctgtctactgtgtgagacttcgg

SEQ ID NO: 4163 - DNA, 25 bp, probe
gatccgtgagatccttccatcttct

SEQ ID NO: 4164 - DNA, 25 bp, probe
tgagatccttccatcttcttgaagt

SEQ ID NO: 4165 - DNA, 25 bp, probe
tcacggagcgactgtcgagatcgcc

SEQ ID NO: 4166 - DNA, 25 bp, probe
agcgactgtcgagatcgcctagtat

SEQ ID NO: 4167 - DNA, 25 bp, probe
gatcgcctagtatgttctgtgaaca

SEQ ID NO: 4168 - DNA, 25 bp, probe
ctagtatgttctgtgaacacaaata

SEQ ID NO: 4169 - DNA, 25 bp, probe
agaccgaggcgcatagagaccgagc

SEQ ID NO: 4170 - DNA, 25 bp, probe
aggcgcatagagaccgagcacagcc

SEQ ID NO: 4171 - DNA, 25 bp, probe
atagagaccgagcacagcccagctg

SEQ ID NO: 4172 - DNA, 25 bp, probe
acgtcctcctaggtgatgagatgtg

SEQ ID NO: 4173 - DNA, 25 bp, probe
aacttatgcaagggtgtgagatgtt

SEQ ID NO: 4174 - DNA, 25 bp, probe
tgctgtaaatgcaggtctcttggta

SEQ ID NO: 4175 - DNA, 25 bp, probe
tggaagcaggacacctggaactgcg

SEQ ID NO: 4176 - DNA, 25 bp, probe
cgtgatcacacttaccgagcttact

SEQ ID NO: 4177 - DNA, 25 bp, probe
gtgatcacacttaccgagcttactt

SEQ ID NO: 4178 - DNA, 25 bp, probe
cacttaccgagcttactttgatctg

SEQ ID NO: 4179 - DNA, 25 bp, probe
acttaccgagcttactttgatctgt

SEQ ID NO: 4180 - DNA, 25 bp, probe
cttaccgagcttactttgatctgtt

SEQ ID NO: 4181 - DNA, 25 bp, probe
accgagcttactttgatctgtttgt

SEQ ID NO: 4182 - DNA, 25 bp, probe
gagcttactttgatctgtttgtcaa

SEQ ID NO: 4183 - DNA, 25 bp, probe
agcttactttgatctgtttgtcaat

SEQ ID NO: 4184 - DNA, 25 bp, probe
gcttactttgatctgtttgtcaata

SEQ ID NO: 4185 - DNA, 25 bp, probe
cttactttgatctgtttgtcaatag

SEQ ID NO: 4186 - DNA, 25 bp, probe
ttactttgatctgtttgtcaatagc

SEQ ID NO: 4187 - DNA, 25 bp, probe
actttgatctgtttgtcaatagcat

SEQ ID NO: 4188 - DNA, 25 bp, probe
tttgatctgtttgtcaatagcatgc

SEQ ID NO: 4189 - DNA, 25 bp, probe
ttgatctgtttgtcaatagcatgca

SEQ ID NO: 4190 - DNA, 25 bp, probe
tgatctgtttgtcaatagcatgcaa

SEQ ID NO: 4191 - DNA, 25 bp, probe
gatctgtttgtcaatagcatgcaaa

SEQ ID NO: 4192 - DNA, 25 bp, probe
tcttgagggagcttagccaatgtgg

SEQ ID NO: 4193 - DNA, 25 bp, probe
agcagagacactaacgacttcaggg

SEQ ID NO: 4194 - DNA, 25 bp, probe
gcagggctctgatattccatgaatg

SEQ ID NO: 4195 - DNA, 25 bp, probe
gctctgatattccatgaatgtatca

SEQ ID NO: 4196 - DNA, 25 bp, probe
aatatttccttaaactgtgtggact

SEQ ID NO: 4197 - DNA, 25 bp, probe
gtgtggactgtgatgccacacagag

SEQ ID NO: 4198 - DNA, 25 bp, probe
gtgatgccacacagagtggtctttc

SEQ ID NO: 4199 - DNA, 25 bp, probe
cacagagtggtctttctggagaggt

SEQ ID NO: 4200 - DNA, 25 bp, probe
ctttctggagaggttataggtcact

SEQ ID NO: 4201 - DNA, 25 bp, probe
ataggtcactcctggggcctcttgg

SEQ ID NO: 4202 - DNA, 25 bp, probe
ccccacgtgacagtgcctgggaatg

SEQ ID NO: 4203 - DNA, 25 bp, probe
gaccagcactgtctcagtttcactt

SEQ ID NO: 4204 - DNA, 25 bp, probe
tttcacatagatgtccctttcttgg

SEQ ID NO: 4205 - DNA, 25 bp, probe
agatgtccctttcttggccagttat

SEQ ID NO: 4206 - DNA, 25 bp, probe
atgtccctttcttggccagttatcc

SEQ ID NO: 4207 - DNA, 25 bp, probe
gcctagttcatccaatcctcactgg

SEQ ID NO: 4208 - DNA, 25 bp, probe
gagctggtgtataccggtttctggc

SEQ ID NO: 4209 - DNA, 25 bp, probe
agtgtgaatttgtccgccactgcat

SEQ ID NO: 4210 - DNA, 25 bp, probe
tttgtccgccactgcatcgccaagt

SEQ ID NO: 4211 - DNA, 25 bp, probe
actgcatcgccaagtcccaggagcg

SEQ ID NO: 4212 - DNA, 25 bp, probe
tgcatcgccaagtcccaggagcgag

SEQ ID NO: 4213 - DNA, 25 bp, probe
cgccaagtcccaggagcgagtggaa

SEQ ID NO: 4214 - DNA, 25 bp, probe
ggaaagtgcaggtgtccgtcctcaa

SEQ ID NO: 4215 - DNA, 25 bp, probe
aggtgtacatcctcggccgggagtc

SEQ ID NO: 4216 - DNA, 25 bp, probe
gggagtccccactgtctctctacaa

SEQ ID NO: 4217 - DNA, 25 bp, probe
gagtccccactgtctctctacaatg

SEQ ID NO: 4218 - DNA, 25 bp, probe
cactgccaaatagacccgtgtacaa

SEQ ID NO: 4219 - DNA, 25 bp, probe
tagacccgtgtacaatgaggagctg

SEQ ID NO: 4220 - DNA, 25 bp, probe
ggggcctcctcaatttgcagatccc

SEQ ID NO: 4221 - DNA, 25 bp, probe
tgcagatcccccaagtacaggcgct

SEQ ID NO: 4222 - DNA, 25 bp, probe
tcccccaagtacaggcgctaattgt

SEQ ID NO: 4223 - DNA, 25 bp, probe
aatttgtaattgtgacttgttctcc

SEQ ID NO: 4224 - DNA, 25 bp, probe
ctgccagtagcatatgcttgtctca

SEQ ID NO: 4225 - DNA, 25 bp, probe
aaagattaagccatgcatgtctaag

SEQ ID NO: 4226 - DNA, 25 bp, probe
taagccatgcatgtctaagtacgca

SEQ ID NO: 4227 - DNA, 25 bp, probe
gtctaagtacgcacggccggtacag

SEQ ID NO: 4228 - DNA, 25 bp, probe
ggtacagtgaaactgcgaatggctc

SEQ ID NO: 4229 - DNA, 25 bp, probe
cattaaatcagttatggttcctttg

SEQ ID NO: 4230 - DNA, 25 bp, probe
atcagttatggttcctttggtcgct

SEQ ID NO: 4231 - DNA, 25 bp, probe
tcgctcctctcctacttggataact

SEQ ID NO: 4232 - DNA, 25 bp, probe
aattctagagctaatacatgccgac

SEQ ID NO: 4233 - DNA, 25 bp, probe
aatacatgccgacgggcgctgaccc

SEQ ID NO: 4234 - DNA, 25 bp, probe
tttatcagatcaaaaccaacccggt

SEQ ID NO: 4235 - DNA, 25 bp, probe
cggctttggtgactctagataacct

SEQ ID NO: 4236 - DNA, 25 bp, probe
tgactctagataacctcgggccgat

SEQ ID NO: 4237 - DNA, 25 bp, probe
cgtggcggcgacgacccattcgaac

SEQ ID NO: 4238 - DNA, 25 bp, probe
gacccattcgaacgtctgccctatc

SEQ ID NO: 4239 - DNA, 25 bp, probe
ccctatcaactttcgatggtagtcg

SEQ ID NO: 4240 - DNA, 25 bp, probe
tcgatggtagtcgccgtgcctacca

SEQ ID NO: 4241 - DNA, 25 bp, probe
cctaccatggtgaccacgggtgacg

SEQ ID NO: 4242 - DNA, 25 bp, probe
acggctaccacatccaaggaaggca

SEQ ID NO: 4243 - DNA, 25 bp, probe
ggcagcaggcgcgcaaattacccac

SEQ ID NO: 4244 - DNA, 25 bp, probe
ccggtgtggcgtggaacctcaagca

SEQ ID NO: 4245 - DNA, 25 bp, probe
agcaggggcaattccacctcaccag

SEQ ID NO: 4246 - DNA, 25 bp, probe
cagatgcaaggcatctcagcaccct

SEQ ID NO: 4247 - DNA, 25 bp, probe
agatgcaaggcatctcagcaccctc

SEQ ID NO: 4248 - DNA, 25 bp, probe
gctcctggagccagggtgctcgtct

SEQ ID NO: 4249 - DNA, 25 bp, probe
gcctttgcccacactggcgcatggg

SEQ ID NO: 4250 - DNA, 25 bp, probe
aaaggggcttcctgcaccacacatg

SEQ ID NO: 4251 - DNA, 25 bp, probe
gattgagggccgtccctgtgctcct

SEQ ID NO: 4252 - DNA, 25 bp, probe
gccgcgcaggcagaagggatctccc

SEQ ID NO: 4253 - DNA, 25 bp, probe
ccgcgcaggcagaagggatctccca

SEQ ID NO: 4254 - DNA, 25 bp, probe
ctgccccagcacatggggattttgc

SEQ ID NO: 4255 - DNA, 25 bp, probe
aggctcctccagaaggggcgctctc

SEQ ID NO: 4256 - DNA, 25 bp, probe
ctcctaggtggcatccacacaaggg

SEQ ID NO: 4257 - DNA, 25 bp, probe
aaatccggaaggactgggacgcgca

SEQ ID NO: 4258 - DNA, 25 bp, probe
ccacagggccaaggtgtgcttgcgc

SEQ ID NO: 4259 - DNA, 25 bp, probe
agggccaaggtgtgcttgcgccacc

SEQ ID NO: 4260 - DNA, 25 bp, probe
taaagtgaacacacacaagggagct

SEQ ID NO: 4261 - DNA, 25 bp, probe
acacaagggagcttgcttgcagatg

SEQ ID NO: 4262 - DNA, 25 bp, probe
ttgcttgcagatggtctgagttctt

SEQ ID NO: 4263 - DNA, 25 bp, probe
tggttgttcctgcatcccgatacct

SEQ ID NO: 4264 - DNA, 25 bp, probe
gttgttcctgcatcccgatacctca

SEQ ID NO: 4265 - DNA, 25 bp, probe
ccacagcctccttctgtttgtcgag

SEQ ID NO: 4266 - DNA, 25 bp, probe
cacagcctccttctgtttgtcgagc

SEQ ID NO: 4267 - DNA, 25 bp, probe
acagcctccttctgtttgtcgagca

SEQ ID NO: 4268 - DNA, 25 bp, probe
ctccttctgtttgtcgagcatttct

SEQ ID NO: 4269 - DNA, 25 bp, probe
gtttgtcgagcatttcttctactct

SEQ ID NO: 4270 - DNA, 25 bp, probe
gtcgagcatttcttctactcttgag

SEQ ID NO: 4271 - DNA, 25 bp, probe
cgagcatttcttctactcttgagag

SEQ ID NO: 4272 - DNA, 25 bp, probe
ttctactcttgagagctcaggcagc

SEQ ID NO: 4273 - DNA, 25 bp, probe
tctactcttgagagctcaggcagcg

SEQ ID NO: 4274 - DNA, 25 bp, probe
tactattgctatcttttctggatga

SEQ ID NO: 4275 - DNA, 25 bp, probe
ttgctatcttttctggatgatcaga

SEQ ID NO: 4276 - DNA, 25 bp, probe
cacagccgcattggtgactcacttc

SEQ ID NO: 4277 - DNA, 25 bp, probe
ccgcattggtgactcacttcaatgt

SEQ ID NO: 4278 - DNA, 25 bp, probe
gcattggtgactcacttcaatgtgt

SEQ ID NO: 4279 - DNA, 25 bp, probe
ttggtgactcacttcaatgtgtcat

SEQ ID NO: 4280 - DNA, 25 bp, probe
gtgactcacttcaatgtgtcatttc

SEQ ID NO: 4281 - DNA, 25 bp, probe
gactcacttcaatgtgtcatttccg

SEQ ID NO: 4282 - DNA, 25 bp, probe
cacttcaatgtgtcatttccggctg

SEQ ID NO: 4283 - DNA, 25 bp, probe
ttcaatgtgtcatttccggctgctg

SEQ ID NO: 4284 - DNA, 25 bp, probe
caatgtgtcatttccggctgctgtg

SEQ ID NO: 4285 - DNA, 25 bp, probe
gtcatttccggctgctgtgtgtgag

SEQ ID NO: 4286 - DNA, 25 bp, probe
tttccggctgctgtgtgtgagcagt

SEQ ID NO: 4287 - DNA, 25 bp, probe
agagagacaggcagctcggattcaa

SEQ ID NO: 4288 - DNA, 25 bp, probe
gagacaggcagctcggattcaacta

SEQ ID NO: 4289 - DNA, 25 bp, probe
caggcagctcggattcaactacctt

SEQ ID NO: 4290 - DNA, 25 bp, probe
aggcagctcggattcaactacctta

SEQ ID NO: 4291 - DNA, 25 bp, probe
ggcagctcggattcaactaccttag

SEQ ID NO: 4292 - DNA, 25 bp, probe
ctttcatgtcccagaacttagcctt

SEQ ID NO: 4293 - DNA, 25 bp, probe
tgtcccagaacttagcctttacctg

SEQ ID NO: 4294 - DNA, 25 bp, probe
tagcctttacctgtgaagtgttact

SEQ ID NO: 4295 - DNA, 25 bp, probe
ttacctgtgaagtgttactacagcc

SEQ ID NO: 4296 - DNA, 25 bp, probe
tagttgcatagcagtatatgttaat

SEQ ID NO: 4297 - DNA, 25 bp, probe
tgtttttagctgtgacacaactgtg

SEQ ID NO: 4298 - DNA, 25 bp, probe
tagctgtgacacaactgtgtgatta

SEQ ID NO: 4299 - DNA, 25 bp, probe
tatactttagtagacatttataact

SEQ ID NO: 4300 - DNA, 25 bp, probe
tataactcaaggataccttcttatt

SEQ ID NO: 4301 - DNA, 25 bp, probe
ttatcatgaatgcttttagtgtgtg

SEQ ID NO: 4302 - DNA, 25 bp, probe
cttttagtgtgtgcataatagctac

SEQ ID NO: 4303 - DNA, 25 bp, probe
tagctacagtgcatagttgtagaca

SEQ ID NO: 4304 - DNA, 25 bp, probe
acaacatttatatgtagcctttact

SEQ ID NO: 4305 - DNA, 25 bp, probe
tgtagcctttactgtttgatatacc

SEQ ID NO: 4306 - DNA, 25 bp, probe
aaattgtatctcattacttatactg

SEQ ID NO: 4307 - DNA, 25 bp, probe
tatactgggacaccattaccaaaat

SEQ ID NO: 4308 - DNA, 25 bp, probe
tttgtatgtcaaagctttgactcta

SEQ ID NO: 4309 - DNA, 25 bp, probe
gtcaaagctttgactctataagcaa

SEQ ID NO: 4310 - DNA, 25 bp, probe
aaagctttcatgtcccagaacttag

SEQ ID NO: 4311 - DNA, 25 bp, probe
tgtcccagaacttagcctttacctg

SEQ ID NO: 4312 - DNA, 25 bp, probe
tagcctttacctgtgaagtgttact

SEQ ID NO: 4313 - DNA, 25 bp, probe
ttacctgtgaagtgttactacagcc

SEQ ID NO: 4314 - DNA, 25 bp, probe
gaagtgttactacagccttaatatt

SEQ ID NO: 4315 - DNA, 25 bp, probe
tgtgtgtttttagctgtgacacaac

SEQ ID NO: 4316 - DNA, 25 bp, probe
tgtttttagctgtgacacaactgtg

SEQ ID NO: 4317 - DNA, 25 bp, probe
tagctgtgacacaactgtgtgatta

SEQ ID NO: 4318 - DNA, 25 bp, probe
ctgtgacacaactgtgtgattaaaa

SEQ ID NO: 4319 - DNA, 25 bp, probe
cttttagtgtgtgcataatagctac

SEQ ID NO: 4320 - DNA, 25 bp, probe
tagctacagtgcatagttgtagaca

SEQ ID NO: 4321 - DNA, 25 bp, probe
tgtagcctttactgtttgatatacc

SEQ ID NO: 4322 - DNA, 25 bp, probe
gtagcctttactgtttgatatacca

SEQ ID NO: 4323 - DNA, 25 bp, probe
attgtatctcattacttatactggg

SEQ ID NO: 4324 - DNA, 25 bp, probe
agggctctgccgatcgcctatgtga

SEQ ID NO: 4325 - DNA, 25 bp, probe
tatgtgacagcaaaggggcctacct

SEQ ID NO: 4326 - DNA, 25 bp, probe
cctacctgctcatggagttagccaa

SEQ ID NO: 4327 - DNA, 25 bp, probe
aggacaagactctcaagatttatga

SEQ ID NO: 4328 - DNA, 25 bp, probe
cctaccatgttctccacaaggagct

SEQ ID NO: 4329 - DNA, 25 bp, probe
tccacaaggagcttcctgaagtcac

SEQ ID NO: 4330 - DNA, 25 bp, probe
gtcttccatgaaataaacatgtggg

SEQ ID NO: 4331 - DNA, 25 bp, probe
gacagccacggcaggaactgcgtcc

SEQ ID NO: 4332 - DNA, 25 bp, probe
ggcagagatggcttctcagatatgg

SEQ ID NO: 4333 - DNA, 25 bp, probe
gagatggcttctcagatatggcttg

SEQ ID NO: 4334 - DNA, 25 bp, probe
agatggcttctcagatatggcttgc

SEQ ID NO: 4335 - DNA, 25 bp, probe
tatacattagactatcagacactgg

SEQ ID NO: 4336 - DNA, 25 bp, probe
accttaatggttagacactttatgc

SEQ ID NO: 4337 - DNA, 25 bp, probe
atgtgctaaaatgtccactgaaaac

SEQ ID NO: 4338 - DNA, 25 bp, probe
gtgctaaaatgtccactgaaaacaa

SEQ ID NO: 4339 - DNA, 25 bp, probe
ctgcaataactggaggcgcctcctt

SEQ ID NO: 4340 - DNA, 25 bp, probe
aatttacatctgtggaatagcattc

SEQ ID NO: 4341 - DNA, 25 bp, probe
agggaccacactggtggtaagagaa

SEQ ID NO: 4342 - DNA, 25 bp, probe
ccacactggtggtaagagaaattaa

SEQ ID NO: 4343 - DNA, 25 bp, probe
attaagctgctcagcaaggaactgc

SEQ ID NO: 4344 - DNA, 25 bp, probe
tctgtctatgtgaccggtgtgtgcg

SEQ ID NO: 4345 - DNA, 25 bp, probe
ccggtgtgtgcgtggccttcatact

SEQ ID NO: 4346 - DNA, 25 bp, probe
tgtgcgtggccttcatactcctctc

SEQ ID NO: 4347 - DNA, 25 bp, probe
gagtgctcggcgtatttttcaggaa

SEQ ID NO: 4348 - DNA, 25 bp, probe
tttcaggaaattgctcaagaactat

SEQ ID NO: 4349 - DNA, 25 bp, probe
ttgctcaagaactataccataagag

SEQ ID NO: 4350 - DNA, 25 bp, probe
taccataagagacatgtggaaacaa

SEQ ID NO: 4351 - DNA, 25 bp, probe
cagaagagtactttccaactatgaa

SEQ ID NO: 4352 - DNA, 25 bp, probe
tccaactatgaaaggccatagaaac

SEQ ID NO: 4353 - DNA, 25 bp, probe
gaagtcactgaaaatccaactccag

SEQ ID NO: 4354 - DNA, 25 bp, probe
ctccaggagctatggcagtgttaat

SEQ ID NO: 4355 - DNA, 25 bp, probe
taaactgaaaagacaactggctaca

SEQ ID NO: 4356 - DNA, 25 bp, probe
ttgaagaccccactaaccgccaaca

SEQ ID NO: 4357 - DNA, 25 bp, probe
cctggcacgtggcttcagccccaag

SEQ ID NO: 4358 - DNA, 25 bp, probe
cacgtggcttcagccccaaggatgt

SEQ ID NO: 4359 - DNA, 25 bp, probe
acgtggcttcagccccaaggatgtg

SEQ ID NO: 4360 - DNA, 25 bp, probe
cgtggcttcagccccaaggatgtgc

SEQ ID NO: 4361 - DNA, 25 bp, probe
caaggatgtgctggttcgctggctg

SEQ ID NO: 4362 - DNA, 25 bp, probe
aaggatgtgctggttcgctggctgc

SEQ ID NO: 4363 - DNA, 25 bp, probe
aggatgtgctggttcgctggctgca

SEQ ID NO: 4364 - DNA, 25 bp, probe
ggatgtgctggttcgctggctgcag

SEQ ID NO: 4365 - DNA, 25 bp, probe
gatgtgctggttcgctggctgcagg

SEQ ID NO: 4366 - DNA, 25 bp, probe
atgtgctggttcgctggctgcaggg

SEQ ID NO: 4367 - DNA, 25 bp, probe
tgtgctggttcgctggctgcagggg

SEQ ID NO: 4368 - DNA, 25 bp, probe
tgctggttcgctggctgcaggggtc

SEQ ID NO: 4369 - DNA, 25 bp, probe
gctggttcgctggctgcaggggtca

SEQ ID NO: 4370 - DNA, 25 bp, probe
ctggttcgctggctgcaggggtcac

SEQ ID NO: 4371 - DNA, 25 bp, probe
tggttcgctggctgcaggggtcaca

SEQ ID NO: 4372 - DNA, 25 bp, probe
agagcgctgttcaaggaccacctga

SEQ ID NO: 4373 - DNA, 25 bp, probe
ccacctgagcgtgacctctgtggct

SEQ ID NO: 4374 - DNA, 25 bp, probe
gcgtgacctctgtggctgctacagc

SEQ ID NO: 4375 - DNA, 25 bp, probe
gctacagcgtgtccagtgtcctgcc

SEQ ID NO: 4376 - DNA, 25 bp, probe
atccggaaacacattccggcccgag

SEQ ID NO: 4377 - DNA, 25 bp, probe
ctggtgacgctgacgtgcctggcac

SEQ ID NO: 4378 - DNA, 25 bp, probe
ggtcacaggagctgccccgcgagaa

SEQ ID NO: 4379 - DNA, 25 bp, probe
agctgccccgcgagaagtacctgac

SEQ ID NO: 4380 - DNA, 25 bp, probe
ctgccccgcgagaagtacctgactt

SEQ ID NO: 4381 - DNA, 25 bp, probe
agaagtacctgacttgggcatcccg

SEQ ID NO: 4382 - DNA, 25 bp, probe
ctgacttgggcatcccggcaggagc

SEQ ID NO: 4383 - DNA, 25 bp, probe
ctggccttcacacagaagaccatcg

SEQ ID NO: 4384 - DNA, 25 bp, probe
cacacagaagaccatcgaccgcttg

SEQ ID NO: 4385 - DNA, 25 bp, probe
tcaatgtgtctgttgtcatggcgga

SEQ ID NO: 4386 - DNA, 25 bp, probe
caatgtgtctgttgtcatggcggag

SEQ ID NO: 4387 - DNA, 25 bp, probe
acctggacgccctcaagtgggaaga

SEQ ID NO: 4388 - DNA, 25 bp, probe
ctctttgcatttgtaaagctttgga

SEQ ID NO: 4389 - DNA, 25 bp, probe
ttccatatttactgaagctcagaag

SEQ ID NO: 4390 - DNA, 25 bp, probe
gctcagaagcagtattgggtctgca

SEQ ID NO: 4391 - DNA, 25 bp, probe
aatgttaacccctgtatagaattga

SEQ ID NO: 4392 - DNA, 25 bp, probe
ctacattccaaggagagatttaaag

SEQ ID NO: 4393 - DNA, 25 bp, probe
tacattccaaggagagatttaaagc

SEQ ID NO: 4394 - DNA, 25 bp, probe
accatgaatcttccaaagcgcaaag

SEQ ID NO: 4395 - DNA, 25 bp, probe
atgaatcttccaaagcgcaaagaag

SEQ ID NO: 4396 - DNA, 25 bp, probe
gttatttgccgaggatctgatgacg

SEQ ID NO: 4397 - DNA, 25 bp, probe
tgccgaggatctgatgacgattact

SEQ ID NO: 4398 - DNA, 25 bp, probe
gatgacgattactctttttgcagag

SEQ ID NO: 4399 - DNA, 25 bp, probe
tctttttgcagagctctgaagggag

SEQ ID NO: 4400 - DNA, 25 bp, probe
ttgcagagctctgaagggagagact

SEQ ID NO: 4401 - DNA, 25 bp, probe
aatgctcttttgcttggagtttgtc

SEQ ID NO: 4402 - DNA, 25 bp, probe
atgctcttttgcttggagtttgtca

SEQ ID NO: 4403 - DNA, 25 bp, probe
ttggagtttgtcatcctacaccaac

SEQ ID NO: 4404 - DNA, 25 bp, probe
gttgccagctgagtcccggtattag

SEQ ID NO: 4405 - DNA, 25 bp, probe
ttgccagctgagtcccggtattagg

SEQ ID NO: 4406 - DNA, 25 bp, probe
gctgagtcccggtattagggaatag

SEQ ID NO: 4407 - DNA, 25 bp, probe
ctgagtcccggtattagggaatagt

SEQ ID NO: 4408 - DNA, 25 bp, probe
ggaatagtttcagctctttcaaagt

SEQ ID NO: 4409 - DNA, 25 bp, probe
agtttcagctctttcaaagtgcaca

SEQ ID NO: 4410 - DNA, 25 bp, probe
ttcaaagtgcacagtgttacagtcg

SEQ ID NO: 4411 - DNA, 25 bp, probe
gtgcacagtgttacagtcgaatggg

SEQ ID NO: 4412 - DNA, 25 bp, probe
agtgttacagtcgaatgggctccca

SEQ ID NO: 4413 - DNA, 25 bp, probe
gttacagtcgaatgggctcccatcc

SEQ ID NO: 4414 - DNA, 25 bp, probe
agtcgaatgggctcccatcctggaa

SEQ ID NO: 4415 - DNA, 25 bp, probe
gaatgggctcccatcctggaataat

SEQ ID NO: 4416 - DNA, 25 bp, probe
acagtgcttccttgggttgccagct

SEQ ID NO: 4417 - DNA, 25 bp, probe
tgcttccttgggttgccagctgagt

SEQ ID NO: 4418 - DNA, 25 bp, probe
gcttccttgggttgccagctgagtc

SEQ ID NO: 4419 - DNA, 25 bp, probe
ccttgggttgccagctgagtcccgg

SEQ ID NO: 4420 - DNA, 25 bp, probe
ttctcagtgccttggccctgttgag

SEQ ID NO: 4421 - DNA, 25 bp, probe
gtgccttggccctgttgagtctatc

SEQ ID NO: 4422 - DNA, 25 bp, probe
tctggtaacactggagctgactccc

SEQ ID NO: 4423 - DNA, 25 bp, probe
actggagctgactccctgggaagag

SEQ ID NO: 4424 - DNA, 25 bp, probe
tgactccctgggaagagaggccaaa

SEQ ID NO: 4425 - DNA, 25 bp, probe
ctccctgggaagagaggccaaatgt

SEQ ID NO: 4426 - DNA, 25 bp, probe
aatacttatcccaatgaatgcgtgt

SEQ ID NO: 4427 - DNA, 25 bp, probe
tatcccaatgaatgcgtgttatgtt

SEQ ID NO: 4428 - DNA, 25 bp, probe
tcctcattcaaaaatctgggccttg

SEQ ID NO: 4429 - DNA, 25 bp, probe
cattcaaaaatctgggccttgctga

SEQ ID NO: 4430 - DNA, 25 bp, probe
aatctgggccttgctgagaaccaag

SEQ ID NO: 4431 - DNA, 25 bp, probe
tgctgagaaccaaggttttgaaatc

SEQ ID NO: 4432 - DNA, 25 bp, probe
ttttgaaatcccatcaggtcaccgc

SEQ ID NO: 4433 - DNA, 25 bp, probe
ttgaaatcccatcaggtcaccgcga

SEQ ID NO: 4434 - DNA, 25 bp, probe
gcctgactggccttattgttgaata

SEQ ID NO: 4435 - DNA, 25 bp, probe
cctgactggccttattgttgaataa

SEQ ID NO: 4436 - DNA, 25 bp, probe
cactcctacaaaatcaaagtattgt

SEQ ID NO: 4437 - DNA, 25 bp, probe
caaagtattgtccagacaagagtca

SEQ ID NO: 4438 - DNA, 25 bp, probe
tccagacaagagtcactggcccctg

SEQ ID NO: 4439 - DNA, 25 bp, probe
cagcttctgggtatccagagagcac

SEQ ID NO: 4440 - DNA, 25 bp, probe
ggtatccagagagcactgcacttcc

SEQ ID NO: 4441 - DNA, 25 bp, probe
agagagcactgcacttccccaaaac

SEQ ID NO: 4442 - DNA, 25 bp, probe
gggcaaattccctttctttgcatcc

SEQ ID NO: 4443 - DNA, 25 bp, probe
ttccctttctttgcatccacaatgt

SEQ ID NO: 4444 - DNA, 25 bp, probe
ggaagcctcttccttgtgtctttcg

SEQ ID NO: 4445 - DNA, 25 bp, probe
tttcgctccacttttagctcatcgc

SEQ ID NO: 4446 - DNA, 25 bp, probe
cacttttagctcatcgcaccaatat

SEQ ID NO: 4447 - DNA, 25 bp, probe
gctcatcgcaccaatattgcagact

SEQ ID NO: 4448 - DNA, 25 bp, probe
gcaccaatattgcagacttggaagg

SEQ ID NO: 4449 - DNA, 25 bp, probe
acggccgtcccatggcttccatctg

SEQ ID NO: 4450 - DNA, 25 bp, probe
ggcttccatctgagccacctcggga

SEQ ID NO: 4451 - DNA, 25 bp, probe
gcttggcctatgacaggtcaccgtg

SEQ ID NO: 4452 - DNA, 25 bp, probe
agtacaagtgcaaggtctccaacaa

SEQ ID NO: 4453 - DNA, 25 bp, probe
tacaagtgcaaggtctccaacaaag

SEQ ID NO: 4454 - DNA, 25 bp, probe
tgaccaagaaccaggtcagcctgac

SEQ ID NO: 4455 - DNA, 25 bp, probe
gtcagcctgacctgcctggtcaaag

SEQ ID NO: 4456 - DNA, 25 bp, probe
tgacctgcctggtcaaaggcttcta

SEQ ID NO: 4457 - DNA, 25 bp, probe
agagcaatgggcagccggagaacaa

SEQ ID NO: 4458 - DNA, 25 bp, probe
cagccggagaacaactacaagacca

SEQ ID NO: 4459 - DNA, 25 bp, probe
tgctggactccgacggctccttctt

SEQ ID NO: 4460 - DNA, 25 bp, probe
ctcaccgtggacaagagcaggtggc

SEQ ID NO: 4461 - DNA, 25 bp, probe
tcatgctccgtgatgcatgaggctc

SEQ ID NO: 4462 - DNA, 25 bp, probe
catgctccgtgatgcatgaggctct

SEQ ID NO: 4463 - DNA, 25 bp, probe
tccgtgatgcatgaggctctgcaca

SEQ ID NO: 4464 - DNA, 25 bp, probe
ccgtgatgcatgaggctctgcacaa

SEQ ID NO: 4465 - DNA, 25 bp, probe
tctgcacaaccactacacgcagaag

SEQ ID NO: 4466 - DNA, 25 bp, probe
tctcgcggtcgcacgaggatgcttg

SEQ ID NO: 4467 - DNA, 25 bp, probe
cacgaggatgcttggcacgtacccc

SEQ ID NO: 4468 - DNA, 25 bp, probe
tctccaagccatcacagatatctcc

SEQ ID NO: 4469 - DNA, 25 bp, probe
tccaagccatcacagatatctcctg

SEQ ID NO: 4470 - DNA, 25 bp, probe
caagccatcacagatatctcctgct

SEQ ID NO: 4471 - DNA, 25 bp, probe
ccatcacagatatctcctgctgcta

SEQ ID NO: 4472 - DNA, 25 bp, probe
catcacagatatctcctgctgctat

SEQ ID NO: 4473 - DNA, 25 bp, probe
tcacagatatctcctgctgctatcc

SEQ ID NO: 4474 - DNA, 25 bp, probe
atgtcctaggtcctcccaattctta

SEQ ID NO: 4475 - DNA, 25 bp, probe
ctgtttttctccttctcttattcca

SEQ ID NO: 4476 - DNA, 25 bp, probe
tgtttttctccttctcttattccat

SEQ ID NO: 4477 - DNA, 25 bp, probe
ttttctccttctcttattccattta

SEQ ID NO: 4478 - DNA, 25 bp, probe
ctccttctcttattccatttagttt

SEQ ID NO: 4479 - DNA, 25 bp, probe
tccttctcttattccatttagtttt

SEQ ID NO: 4480 - DNA, 25 bp, probe
ttctcttattccatttagtttttca

SEQ ID NO: 4481 - DNA, 25 bp, probe
tctcttattccatttagtttttcaa

SEQ ID NO: 4482 - DNA, 25 bp, probe
tcttattccatttagtttttcaatt

SEQ ID NO: 4483 - DNA, 25 bp, probe
ttattccatttagtttttcaattca

SEQ ID NO: 4484 - DNA, 25 bp, probe
agaccatcacggatgccgagcttcg

SEQ ID NO: 4485 - DNA, 25 bp, probe
gaccatcacggatgccgagcttcgg

SEQ ID NO: 4486 - DNA, 25 bp, probe
tcacggatgccgagcttcgggtaac

SEQ ID NO: 4487 - DNA, 25 bp, probe
cacggatgccgagcttcgggtaact

SEQ ID NO: 4488 - DNA, 25 bp, probe
acggatgccgagcttcgggtaactc

SEQ ID NO: 4489 - DNA, 25 bp, probe
cggatgccgagcttcgggtaactct

SEQ ID NO: 4490 - DNA, 25 bp, probe
ggatgccgagcttcgggtaactctc

SEQ ID NO: 4491 - DNA, 25 bp, probe
ccgagcttcgggtaactctcacagt

SEQ ID NO: 4492 - DNA, 25 bp, probe
cgagcttcgggtaactctcacagtg

SEQ ID NO: 4493 - DNA, 25 bp, probe
gagcttcgggtaactctcacagtgg

SEQ ID NO: 4494 - DNA, 25 bp, probe
agcttcgggtaactctcacagtgga

SEQ ID NO: 4495 - DNA, 25 bp, probe
gcttcgggtaactctcacagtggaa

SEQ ID NO: 4496 - DNA, 25 bp, probe
cttcgggtaactctcacagtggaag

SEQ ID NO: 4497 - DNA, 25 bp, probe
ttcgggtaactctcacagtggaagg

SEQ ID NO: 4498 - DNA, 25 bp, probe
tcgggtaactctcacagtggaaggt

SEQ ID NO: 4499 - DNA, 25 bp, probe
cgggtaactctcacagtggaaggtt

SEQ ID NO: 4500 - DNA, 25 bp, probe
cgggcccgcagctctacgacgtgat

SEQ ID NO: 4501 - DNA, 25 bp, probe
cccgcagctctacgacgtgatggac

SEQ ID NO: 4502 - DNA, 25 bp, probe
cagctctacgacgtgatggacgcgg

SEQ ID NO: 4503 - DNA, 25 bp, probe
tctacgacgtgatggacgcggtccc

SEQ ID NO: 4504 - DNA, 25 bp, probe
ctacgacgtgatggacgcggtccca

SEQ ID NO: 4505 - DNA, 25 bp, probe
ccgagaccagcagtacgagatgctc

SEQ ID NO: 4506 - DNA, 25 bp, probe
ctgcgtggaagacttgcgcagccgc

SEQ ID NO: 4507 - DNA, 25 bp, probe
tgcgtggaagacttgcgcagccgcc

SEQ ID NO: 4508 - DNA, 25 bp, probe
cacctaggcgctctggtggcccttg

SEQ ID NO: 4509 - DNA, 25 bp, probe
acctaggcgctctggtggcccttgc

SEQ ID NO: 4510 - DNA, 25 bp, probe
tctggtggcccttgcagaagcccta

SEQ ID NO: 4511 - DNA, 25 bp, probe
ttgcagaagccctaagtacggttac

SEQ ID NO: 4512 - DNA, 25 bp, probe
tgcagaagccctaagtacggttact

SEQ ID NO: 4513 - DNA, 25 bp, probe
cctaagtacggttacttatgcgtgt

SEQ ID NO: 4514 - DNA, 25 bp, probe
agtacggttacttatgcgtgtagac

SEQ ID NO: 4515 - DNA, 25 bp, probe
agccaaggcgaagaagcacgaacga

SEQ ID NO: 4516 - DNA, 25 bp, probe
gcttcactggcttcggagtgagcgc

SEQ ID NO: 4517 - DNA, 25 bp, probe
ggaagatgtgcatccgtggtcaaaa

SEQ ID NO: 4518 - DNA, 25 bp, probe
gctttgacggtttctccaagtaagg

SEQ ID NO: 4519 - DNA, 25 bp, probe
attatgaaggccagacttactcatt

SEQ ID NO: 4520 - DNA, 25 bp, probe
ccaagtgagctgcaagaggcccctg

SEQ ID NO: 4521 - DNA, 25 bp, probe
agtgagctgcaagaggcccctgtta

SEQ ID NO: 4522 - DNA, 25 bp, probe
aggcccctgtttcctgagcagtgat

SEQ ID NO: 4523 - DNA, 25 bp, probe
tttcctgagcagtgatgtgctgctc

SEQ ID NO: 4524 - DNA, 25 bp, probe
cagtgatgtgctgctcttcttggtg

SEQ ID NO: 4525 - DNA, 25 bp, probe
agtgatgtgctgctcttcttggtgg

SEQ ID NO: 4526 - DNA, 25 bp, probe
ctgtggctgccatgcaggagcccct

SEQ ID NO: 4527 - DNA, 25 bp, probe
cctgcgtcatctcgttggactcttt

SEQ ID NO: 4528 - DNA, 25 bp, probe
tcatctcgttggactctttaaggga

SEQ ID NO: 4529 - DNA, 25 bp, probe
cgttggactctttaagggagtcagg

SEQ ID NO: 4530 - DNA, 25 bp, probe
tcgtgtcactggatgcctatttaga

SEQ ID NO: 4531 - DNA, 25 bp, probe
cactggatgcctatttagaaataaa

SEQ ID NO: 4532 - DNA, 25 bp, probe
gagccattcagaaaagacttccttt

SEQ ID NO: 4533 - DNA, 25 bp, probe
agacttcctttgtgttcagcctata

SEQ ID NO: 4534 - DNA, 25 bp, probe
gacttcctttgtgttcagcctatac

SEQ ID NO: 4535 - DNA, 25 bp, probe
tcacactcccaagtcacttaaggtg

SEQ ID NO: 4536 - DNA, 25 bp, probe
caaagcccaacaatgatctcaggaa

SEQ ID NO: 4537 - DNA, 25 bp, probe
aaatgttttcatgtagcagcaatgc

SEQ ID NO: 4538 - DNA, 25 bp, probe
aatgttttcatgtagcagcaatgca

SEQ ID NO: 4539 - DNA, 25 bp, probe
ttcatgtagcagcaatgcagatttg

SEQ ID NO: 4540 - DNA, 25 bp, probe
catgtagcagcaatgcagatttggt

SEQ ID NO: 4541 - DNA, 25 bp, probe
gtatgtatttcactttatgactgac

SEQ ID NO: 4542 - DNA, 25 bp, probe
tattgtttggccaaatagtaaacac

SEQ ID NO: 4543 - DNA, 25 bp, probe
caccatgtgtttgctttgtgaaggt

SEQ ID NO: 4544 - DNA, 25 bp, probe
agacaaacataactatttagcagag

SEQ ID NO: 4545 - DNA, 25 bp, probe
gacaaacataactatttagcagaga

SEQ ID NO: 4546 - DNA, 25 bp, probe
cagctggactgctgtacatcaagga

SEQ ID NO: 4547 - DNA, 25 bp, probe
gctgtacatcaaggacagattaact

SEQ ID NO: 4548 - DNA, 25 bp, probe
tcggattcagctggtagggaaagac

SEQ ID NO: 4549 - DNA, 25 bp, probe
cggattcagctggtagggaaagact

SEQ ID NO: 4550 - DNA, 25 bp, probe
ggattcagctggtagggaaagactc

SEQ ID NO: 4551 - DNA, 25 bp, probe
gattcagctggtagggaaagactct

SEQ ID NO: 4552 - DNA, 25 bp, probe
agggaaagactctgcacctgctgtc

SEQ ID NO: 4553 - DNA, 25 bp, probe
gggaaagactctgcacctgctgtct

SEQ ID NO: 4554 - DNA, 25 bp, probe
ggaaagactctgcacctgctgtctt

SEQ ID NO: 4555 - DNA, 25 bp, probe
gaaagactctgcacctgctgtctta

SEQ ID NO: 4556 - DNA, 25 bp, probe
aagactctgcacctgctgtcttagg

SEQ ID NO: 4557 - DNA, 25 bp, probe
agactctgcacctgctgtcttaggg

SEQ ID NO: 4558 - DNA, 25 bp, probe
gactctgcacctgctgtcttaggga

SEQ ID NO: 4559 - DNA, 25 bp, probe
actctgcacctgctgtcttagggaa

SEQ ID NO: 4560 - DNA, 25 bp, probe
ctctgcacctgctgtcttagggaag

SEQ ID NO: 4561 - DNA, 25 bp, probe
ctgcacctgctgtcttagggaagaa

SEQ ID NO: 4562 - DNA, 25 bp, probe
tgcacctgctgtcttagggaagaaa

SEQ ID NO: 4563 - DNA, 25 bp, probe
gcacctgctgtcttagggaagaaat

SEQ ID NO: 4564 - DNA, 25 bp, probe
agatgtatcttttgctctctcttgc

SEQ ID NO: 4565 - DNA, 25 bp, probe
tctcttgctctcttatttgtaccgg

SEQ ID NO: 4566 - DNA, 25 bp, probe
ctcttgctctcttatttgtaccggt

SEQ ID NO: 4567 - DNA, 25 bp, probe
ctctctctccctgatcggtgacagt

SEQ ID NO: 4568 - DNA, 25 bp, probe
ctctctccctgatcggtgacagtca

SEQ ID NO: 4569 - DNA, 25 bp, probe
ctccctgatcggtgacagtcactag

SEQ ID NO: 4570 - DNA, 25 bp, probe
gtcactagcttatcttgaacagata

SEQ ID NO: 4571 - DNA, 25 bp, probe
cagcacacattcctttgaaataagg

SEQ ID NO: 4572 - DNA, 25 bp, probe
gcacacattcctttgaaataaggtt

SEQ ID NO: 4573 - DNA, 25 bp, probe
atttattggtgctactgtttatccg

SEQ ID NO: 4574 - DNA, 25 bp, probe
tgctactgtttatccgtaataattg

SEQ ID NO: 4575 - DNA, 25 bp, probe
taacatcacgtctttgtctctagtg

SEQ ID NO: 4576 - DNA, 25 bp, probe
ctttgtctctagtgcagtttttcga

SEQ ID NO: 4577 - DNA, 25 bp, probe
agtgcagtttttcgagatattccgt

SEQ ID NO: 4578 - DNA, 25 bp, probe
cagtttttcgagatattccgtagta

SEQ ID NO: 4579 - DNA, 25 bp, probe
cgagatattccgtagtacatattta

SEQ ID NO: 4580 - DNA, 25 bp, probe
taatgagctcttgtcctcagtccat

SEQ ID NO: 4581 - DNA, 25 bp, probe
aatgagctcttgtcctcagtccatt

SEQ ID NO: 4582 - DNA, 25 bp, probe
atgagctcttgtcctcagtccattt

SEQ ID NO: 4583 - DNA, 25 bp, probe
tgagctcttgtcctcagtccattta

SEQ ID NO: 4584 - DNA, 25 bp, probe
gagctcttgtcctcagtccatttat

SEQ ID NO: 4585 - DNA, 25 bp, probe
tacttagcatcctaagaaatatgtg

SEQ ID NO: 4586 - DNA, 25 bp, probe
acttagcatcctaagaaatatgtga

SEQ ID NO: 4587 - DNA, 25 bp, probe
cttagcatcctaagaaatatgtgag

SEQ ID NO: 4588 - DNA, 25 bp, probe
tacataactgccttgaacctgtgag

SEQ ID NO: 4589 - DNA, 25 bp, probe
acataactgccttgaacctgtgagt

SEQ ID NO: 4590 - DNA, 25 bp, probe
cataactgccttgaacctgtgagta

SEQ ID NO: 4591 - DNA, 25 bp, probe
ataactgccttgaacctgtgagtaa

SEQ ID NO: 4592 - DNA, 25 bp, probe
actgccttgaacctgtgagtaaata

SEQ ID NO: 4593 - DNA, 25 bp, probe
gccttgaacctgtgagtaaatattg

SEQ ID NO: 4594 - DNA, 25 bp, probe
ccttgaacctgtgagtaaatattga

SEQ ID NO: 4595 - DNA, 25 bp, probe
catttaaagcattgctgttatgtct

SEQ ID NO: 4596 - DNA, 25 bp, probe
acatggagaaagctctgtggattca

SEQ ID NO: 4597 - DNA, 25 bp, probe
ctctgtggattcatcactgtggtgt

SEQ ID NO: 4598 - DNA, 25 bp, probe
gtggtgttctccatgtctgctagcc

SEQ ID NO: 4599 - DNA, 25 bp, probe
ttctccatgtctgctagccatttag

SEQ ID NO: 4600 - DNA, 25 bp, probe
ctgctagccatttaggtaagggtag

SEQ ID NO: 4601 - DNA, 25 bp, probe
atcttgcctaatggactagattgga

SEQ ID NO: 4602 - DNA, 25 bp, probe
ttccattgtgatgacgtcaaacaca

SEQ ID NO: 4603 - DNA, 25 bp, probe
agtgaaagccttcagtcatgctatg

SEQ ID NO: 4604 - DNA, 25 bp, probe
tacagctcattcttactgtggcttg

SEQ ID NO: 4605 - DNA, 25 bp, probe
ttactgtggcttgtagcattcctcc

SEQ ID NO: 4606 - DNA, 25 bp, probe
tggcttgtagcattcctcctcttct

SEQ ID NO: 4607 - DNA, 25 bp, probe
tgtagcattcctcctcttctggcct

SEQ ID NO: 4608 - DNA, 25 bp, probe
aagcacacaaaatgagtcagtttgg

SEQ ID NO: 4609 - DNA, 25 bp, probe
acacaaaatgagtcagtttggggtc

SEQ ID NO: 4610 - DNA, 25 bp, probe
tttagtaacagttggctgtaatcac

SEQ ID NO: 4611 - DNA, 25 bp, probe
gtaacagttggctgtaatcactcct

SEQ ID NO: 4612 - DNA, 25 bp, probe
agatctacaggtaaaacctggtgaa

SEQ ID NO: 4613 - DNA, 25 bp, probe
gtaaaacctggtgaatctctagaag

SEQ ID NO: 4614 - DNA, 25 bp, probe
aacctggtgaatctctagaagttat

SEQ ID NO: 4615 - DNA, 25 bp, probe
cctggtgaatctctagaagttatac

SEQ ID NO: 4616 - DNA, 25 bp, probe
agaagttatacaaaccacagatgac

SEQ ID NO: 4617 - DNA, 25 bp, probe
gaagttatacaaaccacagatgaca

SEQ ID NO: 4618 - DNA, 25 bp, probe
gatgacacaaaagttctctgcagaa

SEQ ID NO: 4619 - DNA, 25 bp, probe
atgacacaaaagttctctgcagaaa

SEQ ID NO: 4620 - DNA, 25 bp, probe
cacaaaagttctctgcagaaatgaa

SEQ ID NO: 4621 - DNA, 25 bp, probe
atatggttatgtccttcggagttac

SEQ ID NO: 4622 - DNA, 25 bp, probe
ctagcggacaatgatggagagatct

SEQ ID NO: 4623 - DNA, 25 bp, probe
tgatgatattgctgatggctgcatc

SEQ ID NO: 4624 - DNA, 25 bp, probe
atgatattgctgatggctgcatcta

SEQ ID NO: 4625 - DNA, 25 bp, probe
atgactagcactcaactttggtcat

SEQ ID NO: 4626 - DNA, 25 bp, probe
cattaggtgccaatgtgaagtctgg

SEQ ID NO: 4627 - DNA, 25 bp, probe
ctctgcttaattgttatctcagaag

SEQ ID NO: 4628 - DNA, 25 bp, probe
cagctggcacaagaggctgaggcct

SEQ ID NO: 4629 - DNA, 25 bp, probe
gcctggctgaattacccatgcttta

SEQ ID NO: 4630 - DNA, 25 bp, probe
cctctccatgaagcttgagacatat

SEQ ID NO: 4631 - DNA, 25 bp, probe
ctctccatgaagcttgagacatata

SEQ ID NO: 4632 - DNA, 25 bp, probe
tagctggagaccattctttccaaag

SEQ ID NO: 4633 - DNA, 25 bp, probe
ggagaccattctttccaaagaactt

SEQ ID NO: 4634 - DNA, 25 bp, probe
atattcatatagtgacaggctgtgc

SEQ ID NO: 4635 - DNA, 25 bp, probe
ttcatatagtgacaggctgtgctcc

SEQ ID NO: 4636 - DNA, 25 bp, probe
tagtgacaggctgtgctccatattt

SEQ ID NO: 4637 - DNA, 25 bp, probe
ttacagtcattttggtcacaatcga

SEQ ID NO: 4638 - DNA, 25 bp, probe
tcattttggtcacaatcgagggttt

SEQ ID NO: 4639 - DNA, 25 bp, probe
tggtcacaatcgagggtttctggaa

SEQ ID NO: 4640 - DNA, 25 bp, probe
caatcgagggtttctggaattttca

SEQ ID NO: 4641 - DNA, 25 bp, probe
gtccagaattcattcccctaagagt

SEQ ID NO: 4642 - DNA, 25 bp, probe
gtcctagagccctttaatatgcact

SEQ ID NO: 4643 - DNA, 25 bp, probe
gcagctcacgaaacccaggcctgtg

SEQ ID NO: 4644 - DNA, 25 bp, probe
gttattactatgagtcaggctctgt

SEQ ID NO: 4645 - DNA, 25 bp, probe
attactatgagtcaggctctgttta

SEQ ID NO: 4646 - DNA, 25 bp, probe
gagtcaggctctgtttattgtttca

SEQ ID NO: 4647 - DNA, 25 bp, probe
tacaccaaagtatgaactggagagg

SEQ ID NO: 4648 - DNA, 25 bp, probe
acctcagttataaggagtctgagaa

SEQ ID NO: 4649 - DNA, 25 bp, probe
cagcttcatttgttgctccgagagt

SEQ ID NO: 4650 - DNA, 25 bp, probe
gcttcatttgttgctccgagagtgt

SEQ ID NO: 4651 - DNA, 25 bp, probe
tttgttgctccgagagtgtttctcc

SEQ ID NO: 4652 - DNA, 25 bp, probe
gctccgagagtgtttctccaaggtt

SEQ ID NO: 4653 - DNA, 25 bp, probe
tccgagagtgtttctccaaggtttt

SEQ ID NO: 4654 - DNA, 25 bp, probe
agagtgtttctccaaggttttctat

SEQ ID NO: 4655 - DNA, 25 bp, probe
aagtagagagatctgccctgtgtta

SEQ ID NO: 4656 - DNA, 25 bp, probe
agagatctgccctgtgttatccagt

SEQ ID NO: 4657 - DNA, 25 bp, probe
ctgccctgtgttatccagttatgag

SEQ ID NO: 4658 - DNA, 25 bp, probe
ccctgtgttatccagttatgagata

SEQ ID NO: 4659 - DNA, 25 bp, probe
ggagataattcctacggggaattct

SEQ ID NO: 4660 - DNA, 25 bp, probe
atacagctctcttcagagtaactgt

SEQ ID NO: 4661 - DNA, 25 bp, probe
agcacaaggcattggccctctggac

SEQ ID NO: 4662 - DNA, 25 bp, probe
gcattggccctctggactcctttct

SEQ ID NO: 4663 - DNA, 25 bp, probe
ttctttcctctctaggctgctcctg

SEQ ID NO: 4664 - DNA, 25 bp, probe
gctgctcctgaatcctgttctctga

SEQ ID NO: 4665 - DNA, 25 bp, probe
cctgaatcctgttctctgacatccg

SEQ ID NO: 4666 - DNA, 25 bp, probe
tcctgttctctgacatccgtggagc

SEQ ID NO: 4667 - DNA, 25 bp, probe
tgttctctgacatccgtggagcccc

SEQ ID NO: 4668 - DNA, 25 bp, probe
cttcaacattttcttctcgtgtgtg

SEQ ID NO: 4669 - DNA, 25 bp, probe
ttcttctcgtgtgtggcccacatcc

SEQ ID NO: 4670 - DNA, 25 bp, probe
caacttctgtttaatctgatcacgg

SEQ ID NO: 4671 - DNA, 25 bp, probe
cttctgtttaatctgatcacggctc

SEQ ID NO: 4672 - DNA, 25 bp, probe
tggcagcattttggtccctgctcct

SEQ ID NO: 4673 - DNA, 25 bp, probe
ttggtccctgctccttgcccatagt

SEQ ID NO: 4674 - DNA, 25 bp, probe
tttcaagtgggcaactctgctctct

SEQ ID NO: 4675 - DNA, 25 bp, probe
caagtgggcaactctgctctctatt

SEQ ID NO: 4676 - DNA, 25 bp, probe
tgcaaccttaattcagctgaagtac

SEQ ID NO: 4677 - DNA, 25 bp, probe
gcaaccttaattcagctgaagtact

SEQ ID NO: 4678 - DNA, 25 bp, probe
tgtggccttatatatcacactattg

SEQ ID NO: 4679 - DNA, 25 bp, probe
ggccttatatatcacactattgtag

SEQ ID NO: 4680 - DNA, 25 bp, probe
tcaacagaaaccaagatagagctac

SEQ ID NO: 4681 - DNA, 25 bp, probe
agatagagctacaaactcagctgta

SEQ ID NO: 4682 - DNA, 25 bp, probe
agctacaaactcagctgtacagttc

SEQ ID NO: 4683 - DNA, 25 bp, probe
ctcttcttgcttttgcattataagg

SEQ ID NO: 4684 - DNA, 25 bp, probe
cttcttgcttttgcattataaggaa

SEQ ID NO: 4685 - DNA, 25 bp, probe
ttaagtctccgattattaggtgatc

SEQ ID NO: 4686 - DNA, 25 bp, probe
tattaggtgatcaccctggatgatc

SEQ ID NO: 4687 - DNA, 25 bp, probe
tcctctttatcactctgcattggtg

SEQ ID NO: 4688 - DNA, 25 bp, probe
actctgcattggtgaatttaatcct

SEQ ID NO: 4689 - DNA, 25 bp, probe
ggtgaatttaatcctctcctttgtg

SEQ ID NO: 4690 - DNA, 25 bp, probe
gtgaatttaatcctctcctttgtgt

SEQ ID NO: 4691 - DNA, 25 bp, probe
cagctttattctaagcaaatctgtg

SEQ ID NO: 4692 - DNA, 25 bp, probe
ttcccctctttctggtgctggcttc

SEQ ID NO: 4693 - DNA, 25 bp, probe
ctccccttgcagtcatcattcgtgt

SEQ ID NO: 4694 - DNA, 25 bp, probe
cattcgtgttctgtgtataccaaat

SEQ ID NO: 4695 - DNA, 25 bp, probe
cgtgttctgtgtataccaaatgatt

SEQ ID NO: 4696 - DNA, 25 bp, probe
ttctgtgtataccaaatgattctgt

SEQ ID NO: 4697 - DNA, 25 bp, probe
tttttgctgggaaaacgatgtcctg

SEQ ID NO: 4698 - DNA, 25 bp, probe
catatgttcaggatttcagaaacaa

SEQ ID NO: 4699 - DNA, 25 bp, probe
ataatgacacaaagcattgggagtc

SEQ ID NO: 4700 - DNA, 25 bp, probe
taatgacacaaagcattgggagtca

SEQ ID NO: 4701 - DNA, 25 bp, probe
tgacacaaagcattgggagtcagac

SEQ ID NO: 4702 - DNA, 25 bp, probe
aagcattgggagtcagactgcttgt

SEQ ID NO: 4703 - DNA, 25 bp, probe
agcattgggagtcagactgcttgta

SEQ ID NO: 4704 - DNA, 25 bp, probe
ggagtcagactgcttgtatattatc

SEQ ID NO: 4705 - DNA, 25 bp, probe
gtcagactgcttgtatattatcaaa

SEQ ID NO: 4706 - DNA, 25 bp, probe
ttttcctatatctccagcaggcacg

SEQ ID NO: 4707 - DNA, 25 bp, probe
taaagtcggcagcagccgctactca

SEQ ID NO: 4708 - DNA, 25 bp, probe
gattcacaatttacagagtattttc

SEQ ID NO: 4709 - DNA, 25 bp, probe
ttcacaatttacagagtattttcat

SEQ ID NO: 4710 - DNA, 25 bp, probe
tcacaatttacagagtattttcata

SEQ ID NO: 4711 - DNA, 25 bp, probe
ttttttcattttatagaaggagcag

SEQ ID NO: 4712 - DNA, 25 bp, probe
aagtcacaaaaactagtaagagctc

SEQ ID NO: 4713 - DNA, 25 bp, probe
ctagtaagagctcaaactagcaata

SEQ ID NO: 4714 - DNA, 25 bp, probe
ttttcccttgccttctctgtaatgc

SEQ ID NO: 4715 - DNA, 25 bp, probe
tttcccttgccttctctgtaatgct

SEQ ID NO: 4716 - DNA, 25 bp, probe
tcccttgccttctctgtaatgctta

SEQ ID NO: 4717 - DNA, 25 bp, probe
cccttgccttctctgtaatgcttaa

SEQ ID NO: 4718 - DNA, 25 bp, probe
cttgccttctctgtaatgcttaatg

SEQ ID NO: 4719 - DNA, 25 bp, probe
ttgccttctctgtaatgcttaatgg

SEQ ID NO: 4720 - DNA, 25 bp, probe
gccttctctgtaatgcttaatggtt

SEQ ID NO: 4721 - DNA, 25 bp, probe
ccttctctgtaatgcttaatggttg

SEQ ID NO: 4722 - DNA, 25 bp, probe
tctctgtaatgcttaatggttgtgt

SEQ ID NO: 4723 - DNA, 25 bp, probe
tctgtaatgcttaatggttgtgtag

SEQ ID NO: 4724 - DNA, 25 bp, probe
tcctggactgccttgaatatcccct

SEQ ID NO: 4725 - DNA, 25 bp, probe
atcattcatgctactgccaacctgg

SEQ ID NO: 4726 - DNA, 25 bp, probe
cattcatgctactgccaacctgggg

SEQ ID NO: 4727 - DNA, 25 bp, probe
ctcacatgtttagagttgcaatcgt

SEQ ID NO: 4728 - DNA, 25 bp, probe
tcacatgtttagagttgcaatcgta

SEQ ID NO: 4729 - DNA, 25 bp, probe
tcttaacgttagaccacaaatagtg

SEQ ID NO: 4730 - DNA, 25 bp, probe
ttagaccacaaatagtgctcgcttt

SEQ ID NO: 4731 - DNA, 25 bp, probe
cacaaatagtgctcgctttctatgt

SEQ ID NO: 4732 - DNA, 25 bp, probe
tagtgctcgctttctatgtagtttg

SEQ ID NO: 4733 - DNA, 25 bp, probe
cattttagaagactctaccagactg

SEQ ID NO: 4734 - DNA, 25 bp, probe
ccagactgtgtattcattgaagtca

SEQ ID NO: 4735 - DNA, 25 bp, probe
taaattgctgtgtatctgatagctc

SEQ ID NO: 4736 - DNA, 25 bp, probe
aaattgctgtgtatctgatagctct

SEQ ID NO: 4737 - DNA, 25 bp, probe
tagctctttggcagtctatatgttt

SEQ ID NO: 4738 - DNA, 25 bp, probe
ctctttggcagtctatatgtttgta

SEQ ID NO: 4739 - DNA, 25 bp, probe
agaataagtcatgttccttcaagat

SEQ ID NO: 4740 - DNA, 25 bp, probe
ggagtccagccaagaggccctgcat

SEQ ID NO: 4741 - DNA, 25 bp, probe
tgcatgtgacggagcgcaaatacct

SEQ ID NO: 4742 - DNA, 25 bp, probe
acctgaagcgagactggtgcaaaac

SEQ ID NO: 4743 - DNA, 25 bp, probe
gaccatccacgaggaaggctgcaac

SEQ ID NO: 4744 - DNA, 25 bp, probe
aggctgcaacagtcgcaccatcatc

SEQ ID NO: 4745 - DNA, 25 bp, probe
atcatcaaccgcttctgttacggcc

SEQ ID NO: 4746 - DNA, 25 bp, probe
gtgggagccctgcttctcctcttgg

SEQ ID NO: 4747 - DNA, 25 bp, probe
gtgcaactctttctacatccccagg

SEQ ID NO: 4748 - DNA, 25 bp, probe
acatccccaggcacatccggaagga

SEQ ID NO: 4749 - DNA, 25 bp, probe
tccccaggcacatccggaaggagga

SEQ ID NO: 4750 - DNA, 25 bp, probe
caagaaattcactaccatgatggtc

SEQ ID NO: 4751 - DNA, 25 bp, probe
gaaattcactaccatgatggtcaca

SEQ ID NO: 4752 - DNA, 25 bp, probe
acagccacctaccaagaagaagaga

SEQ ID NO: 4753 - DNA, 25 bp, probe
tcttggggaccctgctgccggctgc

SEQ ID NO: 4754 - DNA, 25 bp, probe
cctgctgccggctgctgaagggaaa

SEQ ID NO: 4755 - DNA, 25 bp, probe
ctgccggctgctgaagggaaaaaga

SEQ ID NO: 4756 - DNA, 25 bp, probe
ctaacagtgtcactctttgggaggt

SEQ ID NO: 4757 - DNA, 25 bp, probe
tggtacacaaaggactcactttaca

SEQ ID NO: 4758 - DNA, 25 bp, probe
ggaccagcaattcagcaataactta

SEQ ID NO: 4759 - DNA, 25 bp, probe
tgttatagggcgtctctttatcact

SEQ ID NO: 4760 - DNA, 25 bp, probe
gcgtctctttatcactcagcttctg

SEQ ID NO: 4761 - DNA, 25 bp, probe
ctcagcttctgcatcatatgcttgg

SEQ ID NO: 4762 - DNA, 25 bp, probe
tatcggcttcccaagtttactaaga

SEQ ID NO: 4763 - DNA, 25 bp, probe
ttttttggctactctgaaatgttgc

SEQ ID NO: 4764 - DNA, 25 bp, probe
ctctgaaatgttgcagtgtggaaca

SEQ ID NO: 4765 - DNA, 25 bp, probe
aatgaagatcaaactccagctccag

SEQ ID NO: 4766 - DNA, 25 bp, probe
gaagatcaaactccagctccagcct

SEQ ID NO: 4767 - DNA, 25 bp, probe
ccagctccagcctcatttgcttgag

SEQ ID NO: 4768 - DNA, 25 bp, probe
ctcatttgcttgagactttgtgtgt

SEQ ID NO: 4769 - DNA, 25 bp, probe
gtttcagggccattgcaaacatagc

SEQ ID NO: 4770 - DNA, 25 bp, probe
ctgtgcccttgaagagaatagtaat

SEQ ID NO: 4771 - DNA, 25 bp, probe
ggtttatgactgaattccctttgac

SEQ ID NO: 4772 - DNA, 25 bp, probe
ccagtgatgtccacggcaatttcgc

SEQ ID NO: 4773 - DNA, 25 bp, probe
atctgtaatctccactgcttggatg

SEQ ID NO: 4774 - DNA, 25 bp, probe
cactgcttggatgtctgccctctac

SEQ ID NO: 4775 - DNA, 25 bp, probe
gaaacttgccctgtgcctgtgtccc

SEQ ID NO: 4776 - DNA, 25 bp, probe
tttctcttggccaggggcctcgtat

SEQ ID NO: 4777 - DNA, 25 bp, probe
ctgcacagaggattgccccttctct

SEQ ID NO: 4778 - DNA, 25 bp, probe
tgccccttctcttttcagagctggc

SEQ ID NO: 4779 - DNA, 25 bp, probe
gtattttgcacaaagtctaagggac

SEQ ID NO: 4780 - DNA, 25 bp, probe
ctcagcctgactgctgcctaaaaaa

SEQ ID NO: 4781 - DNA, 25 bp, probe
gactactatgctaagggtaaggcca

SEQ ID NO: 4782 - DNA, 25 bp, probe
ctgccattgccaattcagcatagac

SEQ ID NO: 4783 - DNA, 25 bp, probe
ccattgccaattcagcatagacatg

SEQ ID NO: 4784 - DNA, 25 bp, probe
ttgccaattcagcatagacatggct

SEQ ID NO: 4785 - DNA, 25 bp, probe
ccaattcagcatagacatggctttg

SEQ ID NO: 4786 - DNA, 25 bp, probe
attcagcatagacatggctttgtta

SEQ ID NO: 4787 - DNA, 25 bp, probe
agacatggctttgttagtgtttcct

SEQ ID NO: 4788 - DNA, 25 bp, probe
gttttacagtgtttctggcttagaa

SEQ ID NO: 4789 - DNA, 25 bp, probe
tttacagtgtttctggcttagaaca

SEQ ID NO: 4790 - DNA, 25 bp, probe
gtttctggcttagaacaaaggggct

SEQ ID NO: 4791 - DNA, 25 bp, probe
ttctggcttagaacaaaggggctta

SEQ ID NO: 4792 - DNA, 25 bp, probe
attaactctacctgcacactgtcct

SEQ ID NO: 4793 - DNA, 25 bp, probe
tttgaaatgtcaaccccaagttagt

SEQ ID NO: 4794 - DNA, 25 bp, probe
atgttttcaaatgttctccagtcat

SEQ ID NO: 4795 - DNA, 25 bp, probe
tttcaaatgttctccagtcattatg

SEQ ID NO: 4796 - DNA, 25 bp, probe
tcaaatgttctccagtcattatgtt

SEQ ID NO: 4797 - DNA, 25 bp, probe
atatttctgaggagcctgcaacatg

SEQ ID NO: 4798 - DNA, 25 bp, probe
gaggagcctgcaacatgccagccac

SEQ ID NO: 4799 - DNA, 25 bp, probe
ctggcggatccaagcaaatggccaa

SEQ ID NO: 4800 - DNA, 25 bp, probe
cggatccaagcaaatggccaatgag

SEQ ID NO: 4801 - DNA, 25 bp, probe
tgtgcacatctgttttgtaactgtt

SEQ ID NO: 4802 - DNA, 25 bp, probe
tgcacatctgttttgtaactgttta

SEQ ID NO: 4803 - DNA, 25 bp, probe
cacatctgttttgtaactgtttaga

SEQ ID NO: 4804 - DNA, 25 bp, probe
gaaacccaggtgctggaccagggcc

SEQ ID NO: 4805 - DNA, 25 bp, probe
ctagagtgggctaggccctggcttt

SEQ ID NO: 4806 - DNA, 25 bp, probe
tgggctaggccctggctttgcccgt

SEQ ID NO: 4807 - DNA, 25 bp, probe
ctaggccctggctttgcccgtcaga

SEQ ID NO: 4808 - DNA, 25 bp, probe
taggccctggctttgcccgtcagat

SEQ ID NO: 4809 - DNA, 25 bp, probe
tggctttgcccgtcagatttgaacg

SEQ ID NO: 4810 - DNA, 25 bp, probe
ggctttgcccgtcagatttgaacga

SEQ ID NO: 4811 - DNA, 25 bp, probe
tttgcccgtcagatttgaacgaatg

SEQ ID NO: 4812 - DNA, 25 bp, probe
gcccgtcagatttgaacgaatgtgt

SEQ ID NO: 4813 - DNA, 25 bp, probe
ttgaacgaatgtgtgtcccttgagc

SEQ ID NO: 4814 - DNA, 25 bp, probe
aacgaatgtgtgtcccttgagccca

SEQ ID NO: 4815 - DNA, 25 bp, probe
ggacagagccagcagctgccatgcc

SEQ ID NO: 4816 - DNA, 25 bp, probe
aaatgagccagcaccagcgccttgg

SEQ ID NO: 4817 - DNA, 25 bp, probe
tgagccagcaccagcgccttggctt

SEQ ID NO: 4818 - DNA, 25 bp, probe
gcgccttggctttgtgttagcattt

SEQ ID NO: 4819 - DNA, 25 bp, probe
cctgaagtgttctgttggcaataaa

SEQ ID NO: 4820 - DNA, 25 bp, probe
tcattcaacattacgacatgacagg

SEQ ID NO: 4821 - DNA, 25 bp, probe
cattcaacattacgacatgacaggc

SEQ ID NO: 4822 - DNA, 25 bp, probe
attcaacattacgacatgacaggcc

SEQ ID NO: 4823 - DNA, 25 bp, probe
tcccaaaacagataagccctatgag

SEQ ID NO: 4824 - DNA, 25 bp, probe
cccaaaacagataagccctatgagg

SEQ ID NO: 4825 - DNA, 25 bp, probe
ccaaaacagataagccctatgagga

SEQ ID NO: 4826 - DNA, 25 bp, probe
acagataagccctatgaggatgtca

SEQ ID NO: 4827 - DNA, 25 bp, probe
cagataagccctatgaggatgtcag

SEQ ID NO: 4828 - DNA, 25 bp, probe
agataagccctatgaggatgtcagc

SEQ ID NO: 4829 - DNA, 25 bp, probe
gataagccctatgaggatgtcagca

SEQ ID NO: 4830 - DNA, 25 bp, probe
ataagccctatgaggatgtcagcat

SEQ ID NO: 4831 - DNA, 25 bp, probe
taagccctatgaggatgtcagcatc

SEQ ID NO: 4832 - DNA, 25 bp, probe
aagccctatgaggatgtcagcatca

SEQ ID NO: 4833 - DNA, 25 bp, probe
agccctatgaggatgtcagcatcat

SEQ ID NO: 4834 - DNA, 25 bp, probe
gccctatgaggatgtcagcatcata

SEQ ID NO: 4835 - DNA, 25 bp, probe
ccctatgaggatgtcagcatcataa

SEQ ID NO: 4836 - DNA, 25 bp, probe
ttgctataggagtcacctggagcct

SEQ ID NO: 4837 - DNA, 25 bp, probe
taggagtcacctggagcctcggtct

SEQ ID NO: 4838 - DNA, 25 bp, probe
ccgatcctgtctgcagtcacatctt

SEQ ID NO: 4839 - DNA, 25 bp, probe
cagggcccaatttgccctgcctgga

SEQ ID NO: 4840 - DNA, 25 bp, probe
tggctctaggacactctaacaagct

SEQ ID NO: 4841 - DNA, 25 bp, probe
taggacactctaacaagctctgtcc

SEQ ID NO: 4842 - DNA, 25 bp, probe
taacaagctctgtccacgggtctcc

SEQ ID NO: 4843 - DNA, 25 bp, probe
tgtacctgtgccaagcctagcactt

SEQ ID NO: 4844 - DNA, 25 bp, probe
gccaagcctagcacttgtgatgcct

SEQ ID NO: 4845 - DNA, 25 bp, probe
gaggatgactccagtccctgcacgc

SEQ ID NO: 4846 - DNA, 25 bp, probe
ttcacggttgctacccaggcggcca

SEQ ID NO: 4847 - DNA, 25 bp, probe
cggttgctacccaggcggccaagct

SEQ ID NO: 4848 - DNA, 25 bp, probe
ccaggtgccccagtgcctttgtcta

SEQ ID NO: 4849 - DNA, 25 bp, probe
aacatgccccagttgctgatctcta

SEQ ID NO: 4850 - DNA, 25 bp, probe
tgcagctgactatgtattcctgaac

SEQ ID NO: 4851 - DNA, 25 bp, probe
tgactatgtattcctgaactggagc

SEQ ID NO: 4852 - DNA, 25 bp, probe
atccggagcttgctacacttgctgg

SEQ ID NO: 4853 - DNA, 25 bp, probe
ggggacctcccttgggagatcaatc

SEQ ID NO: 4854 - DNA, 25 bp, probe
actgggcaaggaatgcccgcagccc

SEQ ID NO: 4855 - DNA, 25 bp, probe
tcctaagccgcgtcccgtctgtgtg

SEQ ID NO: 4856 - DNA, 25 bp, probe
agccgcgtcccgtctgtgtgggacc

SEQ ID NO: 4857 - DNA, 25 bp, probe
gtcccgtctgtgtgggaccccactg

SEQ ID NO: 4858 - DNA, 25 bp, probe
cgtctgtgtgggaccccactgaaaa

SEQ ID NO: 4859 - DNA, 25 bp, probe
ctcccttgggagatcaatcccctgt

SEQ ID NO: 4860 - DNA, 25 bp, probe
gtgtgggaccccactgaaaatcgga

SEQ ID NO: 4861 - DNA, 25 bp, probe
gactgttcaactcacctggcagcca

SEQ ID NO: 4862 - DNA, 25 bp, probe
ttgggagatcaatcccctgtactcc

SEQ ID NO: 4863 - DNA, 25 bp, probe
tccttcccagatcttctcggcttag

SEQ ID NO: 4864 - DNA, 25 bp, probe
cctgtactcctgttctttgctccgt

SEQ ID NO: 4865 - DNA, 25 bp, probe
tgctccgtgagaaagatccacctac

SEQ ID NO: 4866 - DNA, 25 bp, probe
gtgagaaagatccacctacgacctc

SEQ ID NO: 4867 - DNA, 25 bp, probe
gaaagatccacctacgacctcaggt

SEQ ID NO: 4868 - DNA, 25 bp, probe
gttttaaaaggctcccatgtgagtc

SEQ ID NO: 4869 - DNA, 25 bp, probe
aaaggctcccatgtgagtccctgtg

SEQ ID NO: 4870 - DNA, 25 bp, probe
ccctgccagttctctgtggaagcaa

SEQ ID NO: 4871 - DNA, 25 bp, probe
cagttctctgtggaagcaaggctgg

SEQ ID NO: 4872 - DNA, 25 bp, probe
ccgttggctttggatgtctttgctg

SEQ ID NO: 4873 - DNA, 25 bp, probe
tttggatgtctttgctgcagtcttc

SEQ ID NO: 4874 - DNA, 25 bp, probe
ttggatgtctttgctgcagtcttct

SEQ ID NO: 4875 - DNA, 25 bp, probe
tggatgtctttgctgcagtcttctc

SEQ ID NO: 4876 - DNA, 25 bp, probe
tgtctttgctgcagtcttctctctg

SEQ ID NO: 4877 - DNA, 25 bp, probe
gtctttgctgcagtcttctctctgg

SEQ ID NO: 4878 - DNA, 25 bp, probe
gaggggcccacaggaagctcagcct

SEQ ID NO: 4879 - DNA, 25 bp, probe
gggcccacaggaagctcagccttct

SEQ ID NO: 4880 - DNA, 25 bp, probe
tcccaaggtttgagtccctccaaag

SEQ ID NO: 4881 - DNA, 25 bp, probe
ggtttgagtccctccaaagggcagt

SEQ ID NO: 4882 - DNA, 25 bp, probe
tttgagtccctccaaagggcagtgg

SEQ ID NO: 4883 - DNA, 25 bp, probe
ttgagtccctccaaagggcagtggg

SEQ ID NO: 4884 - DNA, 25 bp, probe
tcaggtgtccgctatccaccaaaag

SEQ ID NO: 4885 - DNA, 25 bp, probe
caggtgtccgctatccaccaaaagg

SEQ ID NO: 4886 - DNA, 25 bp, probe
aggtgtccgctatccaccaaaaggg

SEQ ID NO: 4887 - DNA, 25 bp, probe
ggtgtccgctatccaccaaaagggc

SEQ ID NO: 4888 - DNA, 25 bp, probe
gtgtccgctatccaccaaaagggct

SEQ ID NO: 4889 - DNA, 25 bp, probe
tgtccgctatccaccaaaagggctc

SEQ ID NO: 4890 - DNA, 25 bp, probe
gctatccaccaaaagggctccctga

SEQ ID NO: 4891 - DNA, 25 bp, probe
ctatccaccaaaagggctccctgag

SEQ ID NO: 4892 - DNA, 25 bp, probe
caccaaaagggctccctgagggtct

SEQ ID NO: 4893 - DNA, 25 bp, probe
tctgggcaagggacctgcttctatt

SEQ ID NO: 4894 - DNA, 25 bp, probe
ctgggcaagggacctgcttctatta

SEQ ID NO: 4895 - DNA, 25 bp, probe
tgggcaagggacctgcttctattag

SEQ ID NO: 4896 - DNA, 25 bp, probe
gggcaagggacctgcttctattagc

SEQ ID NO: 4897 - DNA, 25 bp, probe
ggcaagggacctgcttctattagcc

SEQ ID NO: 4898 - DNA, 25 bp, probe
gcaagggacctgcttctattagccc

SEQ ID NO: 4899 - DNA, 25 bp, probe
aagggacctgcttctattagccctt

SEQ ID NO: 4900 - DNA, 25 bp, probe
cggagcagcgctcgcacaagaaggg

SEQ ID NO: 4901 - DNA, 25 bp, probe
agcagcgctcgcacaagaagggcgc

SEQ ID NO: 4902 - DNA, 25 bp, probe
agcgctcgcacaagaagggcgctgg

SEQ ID NO: 4903 - DNA, 25 bp, probe
acaagaagggcgctggcgccaagaa

SEQ ID NO: 4904 - DNA, 25 bp, probe
ctggcgccaagaaggacaaaggcgg

SEQ ID NO: 4905 - DNA, 25 bp, probe
ccagcgtccccaaagtgcccaaggg

SEQ ID NO: 4906 - DNA, 25 bp, probe
gcgtccccaaagtgcccaagggccg

SEQ ID NO: 4907 - DNA, 25 bp, probe
ccaaagtgcccaagggccgcaagtg

SEQ ID NO: 4908 - DNA, 25 bp, probe
aagtgcccaagggccgcaagtgagc

SEQ ID NO: 4909 - DNA, 25 bp, probe
tgcccaagggccgcaagtgagcgtg

SEQ ID NO: 4910 - DNA, 25 bp, probe
ccaagggccgcaagtgagcgtgtcg

SEQ ID NO: 4911 - DNA, 25 bp, probe
tcagagcggccggcgtggacttttc

SEQ ID NO: 4912 - DNA, 25 bp, probe
tgtttttctaccccaagtgacgtag

SEQ ID NO: 4913 - DNA, 25 bp, probe
ttttctaccccaagtgacgtagatt

SEQ ID NO: 4914 - DNA, 25 bp, probe
tctaccccaagtgacgtagattttg

SEQ ID NO: 4915 - DNA, 25 bp, probe
gattttgtacggctcacgccggccg

SEQ ID NO: 4916 - DNA, 25 bp, probe
acggctatagcctggactttcctgt

SEQ ID NO: 4917 - DNA, 25 bp, probe
actgcctgccttagggtagtgctaa

SEQ ID NO: 4918 - DNA, 25 bp, probe
aggacagtcagctctctcctttcag

SEQ ID NO: 4919 - DNA, 25 bp, probe
ggacagtcagctctctcctttcagg

SEQ ID NO: 4920 - DNA, 25 bp, probe
gtcagctctctcctttcagggccaa

SEQ ID NO: 4921 - DNA, 25 bp, probe
ttttgttgagccaggcctctctcac

SEQ ID NO: 4922 - DNA, 25 bp, probe
ttaaagcccgcctgacagaaaccac

SEQ ID NO: 4923 - DNA, 25 bp, probe
ctgacagaaaccacggccacatttg

SEQ ID NO: 4924 - DNA, 25 bp, probe
cacggccacatttggttctaagaaa

SEQ ID NO: 4925 - DNA, 25 bp, probe
agtagcagtgtctgtaaaagagcct

SEQ ID NO: 4926 - DNA, 25 bp, probe
gtagcagtgtctgtaaaagagccta

SEQ ID NO: 4927 - DNA, 25 bp, probe
atcaattcaatttggactggtgtgc

SEQ ID NO: 4928 - DNA, 25 bp, probe
gtgtgctctctttaaatcaagtcct

SEQ ID NO: 4929 - DNA, 25 bp, probe
tgagcaaatatcatactgttcaatg

SEQ ID NO: 4930 - DNA, 25 bp, probe
aatgtggactcaatccctagggctg

SEQ ID NO: 4931 - DNA, 25 bp, probe
aatccctagggctggcagaaaggga

SEQ ID NO: 4932 - DNA, 25 bp, probe
gggtgcatttctaggacttttctaa

SEQ ID NO: 4933 - DNA, 25 bp, probe
gtgcatttctaggacttttctaaca

SEQ ID NO: 4934 - DNA, 25 bp, probe
atctgcactttaactgacttaagtg

SEQ ID NO: 4935 - DNA, 25 bp, probe
ctgcactttaactgacttaagtggc

SEQ ID NO: 4936 - DNA, 25 bp, probe
gcactttaactgacttaagtggcat

SEQ ID NO: 4937 - DNA, 25 bp, probe
cactttaactgacttaagtggcatt

SEQ ID NO: 4938 - DNA, 25 bp, probe
actttaactgacttaagtggcatta

SEQ ID NO: 4939 - DNA, 25 bp, probe
ctttaactgacttaagtggcattaa

SEQ ID NO: 4940 - DNA, 25 bp, probe
ttaactgacttaagtggcattaaac

SEQ ID NO: 4941 - DNA, 25 bp, probe
taactgacttaagtggcattaaaca

SEQ ID NO: 4942 - DNA, 25 bp, probe
aactgacttaagtggcattaaacat

SEQ ID NO: 4943 - DNA, 25 bp, probe
ggtacttaaagcttctatggttgac

SEQ ID NO: 4944 - DNA, 25 bp, probe
gtacttaaagcttctatggttgaca

SEQ ID NO: 4945 - DNA, 25 bp, probe
tacttaaagcttctatggttgacat

SEQ ID NO: 4946 - DNA, 25 bp, probe
acttaaagcttctatggttgacatt

SEQ ID NO: 4947 - DNA, 25 bp, probe
cttaaagcttctatggttgacattg

SEQ ID NO: 4948 - DNA, 25 bp, probe
agtgatgaaacccacagatcctagc

SEQ ID NO: 4949 - DNA, 25 bp, probe
gaaacccacagatcctagcaaatgt

SEQ ID NO: 4950 - DNA, 25 bp, probe
acagatcctagcaaatgtgcccaac

SEQ ID NO: 4951 - DNA, 25 bp, probe
gtgcccaaccagctttactaaaggg

SEQ ID NO: 4952 - DNA, 25 bp, probe
acaagtttcccagaagtgcctggtt

SEQ ID NO: 4953 - DNA, 25 bp, probe
tggttttcatttctcagtcaccaac

SEQ ID NO: 4954 - DNA, 25 bp, probe
catttctcagtcaccaacagatgaa

SEQ ID NO: 4955 - DNA, 25 bp, probe
tcagtcaccaacagatgaataatta

SEQ ID NO: 4956 - DNA, 25 bp, probe
tgttgatgtcaaacagctgagcacc

SEQ ID NO: 4957 - DNA, 25 bp, probe
tgtcaaacagctgagcaccgtagca

SEQ ID NO: 4958 - DNA, 25 bp, probe
agcaccgtagcatgcagatgtcaag

SEQ ID NO: 4959 - DNA, 25 bp, probe
tagcatgcagatgtcaaggcagtta

SEQ ID NO: 4960 - DNA, 25 bp, probe
cagatgtcaaggcagttaggaagta

SEQ ID NO: 4961 - DNA, 25 bp, probe
atatgtgcaaggtagcatgatgagc

SEQ ID NO: 4962 - DNA, 25 bp, probe
caacttgagtttgttgccactgaga

SEQ ID NO: 4963 - DNA, 25 bp, probe
gtttgttgccactgagaagcaggcg

SEQ ID NO: 4964 - DNA, 25 bp, probe
ctaatcccacttgaagcagccctga

SEQ ID NO: 4965 - DNA, 25 bp, probe
taatcccacttgaagcagccctgag

SEQ ID NO: 4966 - DNA, 25 bp, probe
aatcccacttgaagcagccctgaga

SEQ ID NO: 4967 - DNA, 25 bp, probe
atcccacttgaagcagccctgagaa

SEQ ID NO: 4968 - DNA, 25 bp, probe
tcccacttgaagcagccctgagaaa

SEQ ID NO: 4969 - DNA, 25 bp, probe
cccacttgaagcagccctgagaaac

SEQ ID NO: 4970 - DNA, 25 bp, probe
ttgaagcagccctgagaaacatcgc

SEQ ID NO: 4971 - DNA, 25 bp, probe
tgaagcagccctgagaaacatcgcc

SEQ ID NO: 4972 - DNA, 25 bp, probe
gaagcagccctgagaaacatcgccc

SEQ ID NO: 4973 - DNA, 25 bp, probe
aagcagccctgagaaacatcgccca

SEQ ID NO: 4974 - DNA, 25 bp, probe
agcagccctgagaaacatcgcccat

SEQ ID NO: 4975 - DNA, 25 bp, probe
gcagccctgagaaacatcgcccatt

SEQ ID NO: 4976 - DNA, 25 bp, probe
agccctgagaaacatcgcccattct

SEQ ID NO: 4977 - DNA, 25 bp, probe
aaagtcagtgacatgcccatgcgag

SEQ ID NO: 4978 - DNA, 25 bp, probe
agtgacatgcccatgcgagtacctg

SEQ ID NO: 4979 - DNA, 25 bp, probe
gtgacatgcccatgcgagtacctga

SEQ ID NO: 4980 - DNA, 25 bp, probe
catgcccatgcgagtacctgaggaa

SEQ ID NO: 4981 - DNA, 25 bp, probe
gcccatgcgagtacctgaggaaggt

SEQ ID NO: 4982 - DNA, 25 bp, probe
ccatgcgagtacctgaggaaggtga

SEQ ID NO: 4983 - DNA, 25 bp, probe
gtctcagctgccacacatctcatag

SEQ ID NO: 4984 - DNA, 25 bp, probe
agctgccacacatctcatagccggt

SEQ ID NO: 4985 - DNA, 25 bp, probe
cacacatctcatagccggtgatgct

SEQ ID NO: 4986 - DNA, 25 bp, probe
cttacgcagtcacagtactggcttc

SEQ ID NO: 4987 - DNA, 25 bp, probe
ttacgcagtcacagtactggcttct

SEQ ID NO: 4988 - DNA, 25 bp, probe
cagtcacagtactggcttcttcctc

SEQ ID NO: 4989 - DNA, 25 bp, probe
tttctttccatacaagtggcttagg

SEQ ID NO: 4990 - DNA, 25 bp, probe
tttccatacaagtggcttagggatg

SEQ ID NO: 4991 - DNA, 25 bp, probe
tggatgaaaaccactatcttctgtc

SEQ ID NO: 4992 - DNA, 25 bp, probe
gatgaaaaccactatcttctgtcag

SEQ ID NO: 4993 - DNA, 25 bp, probe
ctcactgatgcaaagctttaaggct

SEQ ID NO: 4994 - DNA, 25 bp, probe
taaggcttctctgactgttctgaaa

SEQ ID NO: 4995 - DNA, 25 bp, probe
tcttgtcaagtctaaagagactgaa

SEQ ID NO: 4996 - DNA, 25 bp, probe
aggttctgctggaggaatacaaact

SEQ ID NO: 4997 - DNA, 25 bp, probe
ggttctgctggaggaatacaaactg

SEQ ID NO: 4998 - DNA, 25 bp, probe
tggaattagcacagatccttcctgg

SEQ ID NO: 4999 - DNA, 25 bp, probe
ggaattagcacagatccttcctggc

SEQ ID NO: 5000 - DNA, 25 bp, probe
agcacagatccttcctggctttctg

SEQ ID NO: 5001 - DNA, 25 bp, probe
gtttcacttgatcatttagcccaga

SEQ ID NO: 5002 - DNA, 25 bp, probe
atcatttagcccagaccacccagga

SEQ ID NO: 5003 - DNA, 25 bp, probe
tttgtccttgtcacttggagaaagg

SEQ ID NO: 5004 - DNA, 25 bp, probe
ctgtgacggggcagccctctctgtc

SEQ ID NO: 5005 - DNA, 25 bp, probe
ccctcggtcagctcgtgtgaatcct

SEQ ID NO: 5006 - DNA, 25 bp, probe
gtcagctcgtgtgaatcctgggacc

SEQ ID NO: 5007 - DNA, 25 bp, probe
gtgaatcctgggacctcttccggtc

SEQ ID NO: 5008 - DNA, 25 bp, probe
gctctgcccgctgttctggggtcga

SEQ ID NO: 5009 - DNA, 25 bp, probe
ctttcctgttgtctacaccaatgcc

SEQ ID NO: 5010 - DNA, 25 bp, probe
cctgccttagggtagtgctaagagg

SEQ ID NO: 5011 - DNA, 25 bp, probe
gaggatctcctgtccatcagccagg

SEQ ID NO: 5012 - DNA, 25 bp, probe
tccatcagccaggacagtcagctct

SEQ ID NO: 5013 - DNA, 25 bp, probe
ttttgttgagccaggcctctctcac

SEQ ID NO: 5014 - DNA, 25 bp, probe
ttaaagcccgcctgacagaaaccac

SEQ ID NO: 5015 - DNA, 25 bp, probe
gaaaccacggccacatttggttcta

SEQ ID NO: 5016 - DNA, 25 bp, probe
taagaaaccctctgtcattcgctcc

SEQ ID NO: 5017 - DNA, 25 bp, probe
acattctgatgagcaaccgcttccc

SEQ ID NO: 5018 - DNA, 25 bp, probe
aatttggactggtgtgctctcttta

SEQ ID NO: 5019 - DNA, 25 bp, probe
caaatatcatactgttcaatggttc

SEQ ID NO: 5020 - DNA, 25 bp, probe
acttcaccatgcaatttgtgtcttc

SEQ ID NO: 5021 - DNA, 25 bp, probe
atttgtgtcttcctaaagagagctg

SEQ ID NO: 5022 - DNA, 25 bp, probe
tgtacccagagagtcctgtgctgaa

SEQ ID NO: 5023 - DNA, 25 bp, probe
gactcaatccctagggctggcagaa

SEQ ID NO: 5024 - DNA, 25 bp, probe
gctatagcctggactttcctgttgt

SEQ ID NO: 5025 - DNA, 25 bp, probe
attagatagtgcatcttctgaggtc

SEQ ID NO: 5026 - DNA, 25 bp, probe
ttagatagtgcatcttctgaggtca

SEQ ID NO: 5027 - DNA, 25 bp, probe
tagatagtgcatcttctgaggtcaa

SEQ ID NO: 5028 - DNA, 25 bp, probe
agatagtgcatcttctgaggtcaat

SEQ ID NO: 5029 - DNA, 25 bp, probe
atagtgcatcttctgaggtcaatta

SEQ ID NO: 5030 - DNA, 25 bp, probe
agtgcatcttctgaggtcaattaaa

SEQ ID NO: 5031 - DNA, 25 bp, probe
gtgcatcttctgaggtcaattaaaa

SEQ ID NO: 5032 - DNA, 25 bp, probe
gcatcttctgaggtcaattaaaagg

SEQ ID NO: 5033 - DNA, 25 bp, probe
catcttctgaggtcaattaaaagga

SEQ ID NO: 5034 - DNA, 25 bp, probe
ttagtttgtggcttcatggaaactc

SEQ ID NO: 5035 - DNA, 25 bp, probe
tagtttgtggcttcatggaaactcc

SEQ ID NO: 5036 - DNA, 25 bp, probe
gtggcttcatggaaactccctgtaa

SEQ ID NO: 5037 - DNA, 25 bp, probe
ggcttcatggaaactccctgtaaac

SEQ ID NO: 5038 - DNA, 25 bp, probe
gcttcatggaaactccctgtaaact

SEQ ID NO: 5039 - DNA, 25 bp, probe
ctccctgtaaactaaaagcttcagg

SEQ ID NO: 5040 - DNA, 25 bp, probe
aactaaaagcttcagggttatgtct

SEQ ID NO: 5041 - DNA, 25 bp, probe
aatgtatgcgccagggtgcttccgt

SEQ ID NO: 5042 - DNA, 25 bp, probe
ccatccaagcccaaggacctgggat

SEQ ID NO: 5043 - DNA, 25 bp, probe
catccaagcccaaggacctgggata

SEQ ID NO: 5044 - DNA, 25 bp, probe
atccaagcccaaggacctgggataa

SEQ ID NO: 5045 - DNA, 25 bp, probe
caagcccaaggacctgggataaact

SEQ ID NO: 5046 - DNA, 25 bp, probe
agcccaaggacctgggataaactgg

SEQ ID NO: 5047 - DNA, 25 bp, probe
caaggacctgggataaactgggaga

SEQ ID NO: 5048 - DNA, 25 bp, probe
gacctgggataaactgggagaacta

SEQ ID NO: 5049 - DNA, 25 bp, probe
gagaactatggcagctacttgcatc

SEQ ID NO: 5050 - DNA, 25 bp, probe
tatggcagctacttgcatcgacttg

SEQ ID NO: 5051 - DNA, 25 bp, probe
ggcagctacttgcatcgacttgtac

SEQ ID NO: 5052 - DNA, 25 bp, probe
gctacttgcatcgacttgtacctca

SEQ ID NO: 5053 - DNA, 25 bp, probe
ttgcatcgacttgtacctcacttag

SEQ ID NO: 5054 - DNA, 25 bp, probe
gcatcgacttgtacctcacttagcc

SEQ ID NO: 5055 - DNA, 25 bp, probe
cgacttgtacctcacttagcccttg

SEQ ID NO: 5056 - DNA, 25 bp, probe
acttgtacctcacttagcccttggg

SEQ ID NO: 5057 - DNA, 25 bp, probe
ccatatactctcctatcctcaatac

SEQ ID NO: 5058 - DNA, 25 bp, probe
tatactctcctatcctcaatacctc

SEQ ID NO: 5059 - DNA, 25 bp, probe
atactctcctatcctcaatacctcc

SEQ ID NO: 5060 - DNA, 25 bp, probe
tcctatcctcaatacctccctctac

SEQ ID NO: 5061 - DNA, 25 bp, probe
acccattattctgttctggatctca

SEQ ID NO: 5062 - DNA, 25 bp, probe
caaattacctgggctgcactgccac

SEQ ID NO: 5063 - DNA, 25 bp, probe
aaattacctgggctgcactgccaca

SEQ ID NO: 5064 - DNA, 25 bp, probe
acagcccccattacttcagtgaagc

SEQ ID NO: 5065 - DNA, 25 bp, probe
cctcatctgttagtcatactcccgt

SEQ ID NO: 5066 - DNA, 25 bp, probe
catctgttagtcatactcccgttca

SEQ ID NO: 5067 - DNA, 25 bp, probe
atctgttagtcatactcccgttcac

SEQ ID NO: 5068 - DNA, 25 bp, probe
taatcaggatatccctaagggcgtc

SEQ ID NO: 5069 - DNA, 25 bp, probe
atcaggatatccctaagggcgtccc

SEQ ID NO: 5070 - DNA, 25 bp, probe
ggatatccctaagggcgtcccaatt

SEQ ID NO: 5071 - DNA, 25 bp, probe
tatccctaagggcgtcccaatttct

SEQ ID NO: 5072 - DNA, 25 bp, probe
tccttcctggttaattccaattaag

SEQ ID NO: 5073 - DNA, 25 bp, probe
tttaagttttttcatcataacataa

SEQ ID NO: 5074 - DNA, 25 bp, probe
ttttcctagatattgcacgggagaa

SEQ ID NO: 5075 - DNA, 25 bp, probe
tatccgaactttaatttcaggaatt

SEQ ID NO: 5076 - DNA, 25 bp, probe
aatgggtttgctagaatgtgatatt

SEQ ID NO: 5077 - DNA, 25 bp, probe
ttttgccataaagtcaaatttagct

SEQ ID NO: 5078 - DNA, 25 bp, probe
ttttctgttaaatctggcaacccta

SEQ ID NO: 5079 - DNA, 25 bp, probe
ttaaatctggcaaccctagtctgct

SEQ ID NO: 5080 - DNA, 25 bp, probe
ctggcaaccctagtctgctagccag

SEQ ID NO: 5081 - DNA, 25 bp, probe
ccctagtctgctagccaggatccac

SEQ ID NO: 5082 - DNA, 25 bp, probe
gctagccaggatccacaagtccttg

SEQ ID NO: 5083 - DNA, 25 bp, probe
aggatccacaagtccttgttccact

SEQ ID NO: 5084 - DNA, 25 bp, probe
cacaagtccttgttccactgtgcct

SEQ ID NO: 5085 - DNA, 25 bp, probe
ccttgttccactgtgccttggtttc

SEQ ID NO: 5086 - DNA, 25 bp, probe
aaagtattagccaccatcttacctc

SEQ ID NO: 5087 - DNA, 25 bp, probe
agccaccatcttacctcacagtgat

SEQ ID NO: 5088 - DNA, 25 bp, probe
acatgtggaagcactttaagttttt

SEQ ID NO: 5089 - DNA, 25 bp, probe
caagggggtcaacgtctcagccaat

SEQ ID NO: 5090 - DNA, 25 bp, probe
aagggggtcaacgtctcagccaatc

SEQ ID NO: 5091 - DNA, 25 bp, probe
ggggtcaacgtctcagccaatcagg

SEQ ID NO: 5092 - DNA, 25 bp, probe
gggtcaacgtctcagccaatcagga

SEQ ID NO: 5093 - DNA, 25 bp, probe
ggtcaacgtctcagccaatcaggat

SEQ ID NO: 5094 - DNA, 25 bp, probe
aacgtctcagccaatcaggatgatg

SEQ ID NO: 5095 - DNA, 25 bp, probe
acgtctcagccaatcaggatgatga

SEQ ID NO: 5096 - DNA, 25 bp, probe
cgtctcagccaatcaggatgatgaa

SEQ ID NO: 5097 - DNA, 25 bp, probe
tctcagccaatcaggatgatgaact

SEQ ID NO: 5098 - DNA, 25 bp, probe
ctcagccaatcaggatgatgaacta

SEQ ID NO: 5099 - DNA, 25 bp, probe
tcagccaatcaggatgatgaactag

SEQ ID NO: 5100 - DNA, 25 bp, probe
cagccaatcaggatgatgaactagc

SEQ ID NO: 5101 - DNA, 25 bp, probe
ctaccggatccgaggccgcgacgga

SEQ ID NO: 5102 - DNA, 25 bp, probe
agggttctggtacacgggcagccac

SEQ ID NO: 5103 - DNA, 25 bp, probe
cctgctcttgtttatactgctggtt

SEQ ID NO: 5104 - DNA, 25 bp, probe
gctcttgtttatactgctggtttac

SEQ ID NO: 5105 - DNA, 25 bp, probe
gtttatactgctggtttacactgtt

SEQ ID NO: 5106 - DNA, 25 bp, probe
ttatactgctggtttacactgtttc

SEQ ID NO: 5107 - DNA, 25 bp, probe
actgctggtttacactgtttctcca

SEQ ID NO: 5108 - DNA, 25 bp, probe
ggtttacactgtttctccaagccat

SEQ ID NO: 5109 - DNA, 25 bp, probe
ctaatcccgcttgaagcagccctga

SEQ ID NO: 5110 - DNA, 25 bp, probe
taatcccgcttgaagcagccctgag

SEQ ID NO: 5111 - DNA, 25 bp, probe
cccgcttgaagcagccctgagaaac

SEQ ID NO: 5112 - DNA, 25 bp, probe
ttgaagcagccctgagaaacatcgc

SEQ ID NO: 5113 - DNA, 25 bp, probe
tgaagcagccctgagaaacatcgcc

SEQ ID NO: 5114 - DNA, 25 bp, probe
gaagcagccctgagaaacatcgccc

SEQ ID NO: 5115 - DNA, 25 bp, probe
aagcagccctgagaaacatcgccca

SEQ ID NO: 5116 - DNA, 25 bp, probe
agcagccctgagaaacatcgcccat

SEQ ID NO: 5117 - DNA, 25 bp, probe
gcagccctgagaaacatcgcccatt

SEQ ID NO: 5118 - DNA, 25 bp, probe
agccctgagaaacatcgcccattct

SEQ ID NO: 5119 - DNA, 25 bp, probe
cctggtgatgcctctggccatcatt

SEQ ID NO: 5120 - DNA, 25 bp, probe
ggtcctcagctacaaggaagctgtg

SEQ ID NO: 5121 - DNA, 25 bp, probe
ggtcctcggatgctaacctctaccg

SEQ ID NO: 5122 - DNA, 25 bp, probe
aaggagacagtgtgccccaggacga

SEQ ID NO: 5123 - DNA, 25 bp, probe
gtgccccaggacgacacagcagtca

SEQ ID NO: 5124 - DNA, 25 bp, probe
caggacgacacagcagtcaccagag

SEQ ID NO: 5125 - DNA, 25 bp, probe
cgacacagcagtcaccagaggattg

SEQ ID NO: 5126 - DNA, 25 bp, probe
tcaccagaggattgtgacttcaaga

SEQ ID NO: 5127 - DNA, 25 bp, probe
caggggctcctttgacatcagttgt

SEQ ID NO: 5128 - DNA, 25 bp, probe
ggggctcctttgacatcagttgtga

SEQ ID NO: 5129 - DNA, 25 bp, probe
tgccctgctgggtgatttcttccgg

SEQ ID NO: 5130 - DNA, 25 bp, probe
tgggtgatttcttccggaaatctaa

SEQ ID NO: 5131 - DNA, 25 bp, probe
tttttgcggaatcttgtacccagga

SEQ ID NO: 5132 - DNA, 25 bp, probe
gcggaatcttgtacccaggacagag

SEQ ID NO: 5133 - DNA, 25 bp, probe
cccaggacagagtcctagtgtgtgc

SEQ ID NO: 5134 - DNA, 25 bp, probe
ctaccctggctcaggcttctgggct

SEQ ID NO: 5135 - DNA, 25 bp, probe
tttagtgaacactgttctctgggtg

SEQ ID NO: 5136 - DNA, 25 bp, probe
tctctgggtgacaatacgtaaagaa

SEQ ID NO: 5137 - DNA, 25 bp, probe
gaaatctctttggattctggtcatg

SEQ ID NO: 5138 - DNA, 25 bp, probe
ctctttggattctggtcatgagaag

SEQ ID NO: 5139 - DNA, 25 bp, probe
aatttccagccttcaagaagacaga

SEQ ID NO: 5140 - DNA, 25 bp, probe
cagccttcaagaagacagacattta

SEQ ID NO: 5141 - DNA, 25 bp, probe
ccttcaagaagacagacatttagaa

SEQ ID NO: 5142 - DNA, 25 bp, probe
tgggtggccatcgatctggaccgtc

SEQ ID NO: 5143 - DNA, 25 bp, probe
gggtggccatcgatctggaccgtcc

SEQ ID NO: 5144 - DNA, 25 bp, probe
tgctccccgtgagcactgcgtacaa

SEQ ID NO: 5145 - DNA, 25 bp, probe
accagaactgtgtgtctcatggtat

SEQ ID NO: 5146 - DNA, 25 bp, probe
tgaaatgaggcctactctaaagaat

SEQ ID NO: 5147 - DNA, 25 bp, probe
actaactgctagaagagaagactct

SEQ ID NO: 5148 - DNA, 25 bp, probe
agactctgggttatactggtgcgag

SEQ ID NO: 5149 - DNA, 25 bp, probe
gcgcagccctgagttggagcttcaa

SEQ ID NO: 5150 - DNA, 25 bp, probe
ccctgagttggagcttcaagtgctt

SEQ ID NO: 5151 - DNA, 25 bp, probe
tgctacggccatttcggaagaagcg

SEQ ID NO: 5152 - DNA, 25 bp, probe
agcgagttcccatgggaggttccca

SEQ ID NO: 5153 - DNA, 25 bp, probe
tcccaggaagcttgtattttagagc

SEQ ID NO: 5154 - DNA, 25 bp, probe
agctgggcctggtctcaccctggag

SEQ ID NO: 5155 - DNA, 25 bp, probe
gtctcaccctggaggcaactggtgg

SEQ ID NO: 5156 - DNA, 25 bp, probe
ccctggaggcaactggtggccatgc

SEQ ID NO: 5157 - DNA, 25 bp, probe
ctggaggcaactggtggccatgctc

SEQ ID NO: 5158 - DNA, 25 bp, probe
ggcaaagccaggtccctctcattta

SEQ ID NO: 5159 - DNA, 25 bp, probe
aagccaggtccctctcatttagcct

SEQ ID NO: 5160 - DNA, 25 bp, probe
atcatcatggccagctggaggcagg

SEQ ID NO: 5161 - DNA, 25 bp, probe
ttcctggtgctggaggttggatctt

SEQ ID NO: 5162 - DNA, 25 bp, probe
aggatgggcatggtgttctcctgct

SEQ ID NO: 5163 - DNA, 25 bp, probe
gctgctccctcagactggggcaatg

SEQ ID NO: 5164 - DNA, 25 bp, probe
gctccctcagactggggcaatgtta

SEQ ID NO: 5165 - DNA, 25 bp, probe
tcaagagtgaattccctcactcgtc

SEQ ID NO: 5166 - DNA, 25 bp, probe
gtgaggtcagcacattttcaacagg

SEQ ID NO: 5167 - DNA, 25 bp, probe
cctgggtctgggaagtagctctgat

SEQ ID NO: 5168 - DNA, 25 bp, probe
aagtagctctgatgagaatggggtc

SEQ ID NO: 5169 - DNA, 25 bp, probe
gtagctctgatgagaatggggtccc

SEQ ID NO: 5170 - DNA, 25 bp, probe
tagctctgatgagaatggggtccca

SEQ ID NO: 5171 - DNA, 25 bp, probe
atgagaatggggtcccagatggctc

SEQ ID NO: 5172 - DNA, 25 bp, probe
atggggtcccagatggctcaggctg

SEQ ID NO: 5173 - DNA, 25 bp, probe
tggggtcccagatggctcaggctgt

SEQ ID NO: 5174 - DNA, 25 bp, probe
ggtcccagatggctcaggctgtgac

SEQ ID NO: 5175 - DNA, 25 bp, probe
tcccagatggctcaggctgtgacct

SEQ ID NO: 5176 - DNA, 25 bp, probe
ccagatggctcaggctgtgacctcc

SEQ ID NO: 5177 - DNA, 25 bp, probe
agatggctcaggctgtgacctccct

SEQ ID NO: 5178 - DNA, 25 bp, probe
gatggctcaggctgtgacctccctg

SEQ ID NO: 5179 - DNA, 25 bp, probe
tggctcaggctgtgacctccctggg

SEQ ID NO: 5180 - DNA, 25 bp, probe
gctcaggctgtgacctccctgggca

SEQ ID NO: 5181 - DNA, 25 bp, probe
tcaggctgtgacctccctgggcacc

SEQ ID NO: 5182 - DNA, 25 bp, probe
aggctgtgacctccctgggcaccac

SEQ ID NO: 5183 - DNA, 25 bp, probe
gagccagagcaggtgggtgaggtag

SEQ ID NO: 5184 - DNA, 25 bp, probe
agagcaggtgggtgaggtagttgag

SEQ ID NO: 5185 - DNA, 25 bp, probe
cttcatcatgtcctccgtgaggggg

SEQ ID NO: 5186 - DNA, 25 bp, probe
atcatgtcctccgtgaggggggtgg

SEQ ID NO: 5187 - DNA, 25 bp, probe
cctccgtgaggggggtgggcagcca

SEQ ID NO: 5188 - DNA, 25 bp, probe
cgtgaggggggtgggcagccattcc

SEQ ID NO: 5189 - DNA, 25 bp, probe
tcctcaagggaactcttccccctct

SEQ ID NO: 5190 - DNA, 25 bp, probe
ttcttgtagtcctcccccctcctct

SEQ ID NO: 5191 - DNA, 25 bp, probe
ccctcctctgtctccttcttcggcc

SEQ ID NO: 5192 - DNA, 25 bp, probe
ctcctctgtctccttcttcggcctc

SEQ ID NO: 5193 - DNA, 25 bp, probe
cctctgtctccttcttcggcctctt

SEQ ID NO: 5194 - DNA, 25 bp, probe
tctgtctccttcttcggcctcttct

SEQ ID NO: 5195 - DNA, 25 bp, probe
tctccttcttcggcctcttctttct

SEQ ID NO: 5196 - DNA, 25 bp, probe
gcctcttctttctcaagaatcatcc

SEQ ID NO: 5197 - DNA, 25 bp, probe
aaaactagcaatctgcaggtagggc

SEQ ID NO: 5198 - DNA, 25 bp, probe
tcaagagtcttccttagatcaactt

SEQ ID NO: 5199 - DNA, 25 bp, probe
aggctgtgacatcaatgctatcatc

SEQ ID NO: 5200 - DNA, 25 bp, probe
aaagttgtctgtgtgcgcaaatcca

SEQ ID NO: 5201 - DNA, 25 bp, probe
gtgtgcgcaaatccaaaacagactt

SEQ ID NO: 5202 - DNA, 25 bp, probe
gcgtctcctcagtaaaaaagtcaag

SEQ ID NO: 5203 - DNA, 25 bp, probe
ggaattggacatagcccaagaacag

SEQ ID NO: 5204 - DNA, 25 bp, probe
tggacatagcccaagaacagaaaga

SEQ ID NO: 5205 - DNA, 25 bp, probe
cttgcacatcatggagggtttagtg

SEQ ID NO: 5206 - DNA, 25 bp, probe
tcatagtttgctttgtttaagcatc

SEQ ID NO: 5207 - DNA, 25 bp, probe
gctttgtttaagcatcacattaaag

SEQ ID NO: 5208 - DNA, 25 bp, probe
tccataagctattttggtttagtgc

SEQ ID NO: 5209 - DNA, 25 bp, probe
ccataagctattttggtttagtgca

SEQ ID NO: 5210 - DNA, 25 bp, probe
agattatatggactttcttgcaagc

SEQ ID NO: 5211 - DNA, 25 bp, probe
attatatggactttcttgcaagcaa

SEQ ID NO: 5212 - DNA, 25 bp, probe
tggactttcttgcaagcaacaagct

SEQ ID NO: 5213 - DNA, 25 bp, probe
ggactttcttgcaagcaacaagcta

SEQ ID NO: 5214 - DNA, 25 bp, probe
ttgtctcctaaattgttgtaattgc

SEQ ID NO: 5215 - DNA, 25 bp, probe
tgtgatgtcccaacttgtaaaaatt

SEQ ID NO: 5216 - DNA, 25 bp, probe
tatggtactatgttagccccataat

SEQ ID NO: 5217 - DNA, 25 bp, probe
tggtactatgttagccccataattt

SEQ ID NO: 5218 - DNA, 25 bp, probe
actccagattttttacagctgcctg

SEQ ID NO: 5219 - DNA, 25 bp, probe
ccagattttttacagctgcctgcag

SEQ ID NO: 5220 - DNA, 25 bp, probe
ttacagctgcctgcagtactttacc

SEQ ID NO: 5221 - DNA, 25 bp, probe
gcagtactttacctcctatcagaag

SEQ ID NO: 5222 - DNA, 25 bp, probe
tctcagctcccaaggctctgagcaa

SEQ ID NO: 5223 - DNA, 25 bp, probe
aggctctgagcaaatgtggctcctg

SEQ ID NO: 5224 - DNA, 25 bp, probe
ctctgagcaaatgtggctcctgggg

SEQ ID NO: 5225 - DNA, 25 bp, probe
ggaaacatgactcgtatatgtctca

SEQ ID NO: 5226 - DNA, 25 bp, probe
atgactcgtatatgtctcaggtccc

SEQ ID NO: 5227 - DNA, 25 bp, probe
atatgtctcaggtccctgcagggcc

SEQ ID NO: 5228 - DNA, 25 bp, probe
aagcacctagcctcgctcttggcag

SEQ ID NO: 5229 - DNA, 25 bp, probe
gtatatgttgggtgcaaagttccct

SEQ ID NO: 5230 - DNA, 25 bp, probe
tatatgttgggtgcaaagttcccta

SEQ ID NO: 5231 - DNA, 25 bp, probe
tgccatcttaggttgccatgagcca

SEQ ID NO: 5232 - DNA, 25 bp, probe
ctttagttcaatggacagacctccc

SEQ ID NO: 5233 - DNA, 25 bp, probe
tagttcaatggacagacctcccaag

SEQ ID NO: 5234 - DNA, 25 bp, probe
aggcaaaaactaccttctgacttgg

SEQ ID NO: 5235 - DNA, 25 bp, probe
attgttcccctatcataagagctag

SEQ ID NO: 5236 - DNA, 25 bp, probe
atcataagagctaggccaagcctat

SEQ ID NO: 5237 - DNA, 25 bp, probe
caagcctatgggaccttgagtcatg

SEQ ID NO: 5238 - DNA, 25 bp, probe
cttgagtcatgcaggatgggatctg

SEQ ID NO: 5239 - DNA, 25 bp, probe
tcttccccatcttgcattggaggtc

SEQ ID NO: 5240 - DNA, 25 bp, probe
ttgcattggaggtcccagaaaacaa

SEQ ID NO: 5241 - DNA, 25 bp, probe
cagaaaacaattagcttctggcaaa

SEQ ID NO: 5242 - DNA, 25 bp, probe
ttgctgtttcccaggctcctttttg

SEQ ID NO: 5243 - DNA, 25 bp, probe
tatatattgttctgaggcgcctggc

SEQ ID NO: 5244 - DNA, 25 bp, probe
aggcgcctggcctgtcccttcagtg

SEQ ID NO: 5245 - DNA, 25 bp, probe
gcgcctggcctgtcccttcagtgag

SEQ ID NO: 5246 - DNA, 25 bp, probe
agtgagaagctgttgtcacgactaa

SEQ ID NO: 5247 - DNA, 25 bp, probe
gcagcatcgccgatggcactgatgg

SEQ ID NO: 5248 - DNA, 25 bp, probe
gccgatggcactgatggctttgtaa

SEQ ID NO: 5249 - DNA, 25 bp, probe
ggcactgatggctttgtaattaatc

SEQ ID NO: 5250 - DNA, 25 bp, probe
ttaatctgggccaggggacagacaa

SEQ ID NO: 5251 - DNA, 25 bp, probe
ggacagacaagctgaacctgcattt

SEQ ID NO: 5252 - DNA, 25 bp, probe
gacaagctgaacctgcatttcaacc

SEQ ID NO: 5253 - DNA, 25 bp, probe
ctcgcttcagcgaatccaccattgt

SEQ ID NO: 5254 - DNA, 25 bp, probe
agcgaatccaccattgtctgcaact

SEQ ID NO: 5255 - DNA, 25 bp, probe
ccattgtctgcaactcattggacgg

SEQ ID NO: 5256 - DNA, 25 bp, probe
aattcaaggtgaagctgccagatgg

SEQ ID NO: 5257 - DNA, 25 bp, probe
gatgggcacgagctgacttttccca

SEQ ID NO: 5258 - DNA, 25 bp, probe
cctgagctacctgagcgtaaggggc

SEQ ID NO: 5259 - DNA, 25 bp, probe
gcgggttcaacatgtcctctttcaa

SEQ ID NO: 5260 - DNA, 25 bp, probe
cacaggcctccaggagccgctggga

SEQ ID NO: 5261 - DNA, 25 bp, probe
ggagctgccgccaggagctgtcacc

SEQ ID NO: 5262 - DNA, 25 bp, probe
cgccaggagctgtcaccatgacggg

SEQ ID NO: 5263 - DNA, 25 bp, probe
atggaaacacggctatgaccaaagg

SEQ ID NO: 5264 - DNA, 25 bp, probe
aaacacggctatgaccaaagggaga

SEQ ID NO: 5265 - DNA, 25 bp, probe
ctatgaccaaagggagatcccagcc

SEQ ID NO: 5266 - DNA, 25 bp, probe
ccaaagggagatcccagcctgggca

SEQ ID NO: 5267 - DNA, 25 bp, probe
agggagatcccagcctgggcaggct

SEQ ID NO: 5268 - DNA, 25 bp, probe
gggagatcccagcctgggcaggctg

SEQ ID NO: 5269 - DNA, 25 bp, probe
cctgggcaggctgcgctgctgacca

SEQ ID NO: 5270 - DNA, 25 bp, probe
gcaggctgcgctgctgaccaccctc

SEQ ID NO: 5271 - DNA, 25 bp, probe
tgcgctgctgaccaccctccctggg

SEQ ID NO: 5272 - DNA, 25 bp, probe
cctccctggggcccgggctctgtag

SEQ ID NO: 5273 - DNA, 25 bp, probe
tccctggggcccgggctctgtagga

SEQ ID NO: 5274 - DNA, 25 bp, probe
ctggggcccgggctctgtaggaaag

SEQ ID NO: 5275 - DNA, 25 bp, probe
gggcccgggctctgtaggaaagttg

SEQ ID NO: 5276 - DNA, 25 bp, probe
gcccgggctctgtaggaaagttggt

SEQ ID NO: 5277 - DNA, 25 bp, probe
tgtaggaaagttggtccttgactgt

SEQ ID NO: 5278 - DNA, 25 bp, probe
gcaagtttatgtttcatgcgagaaa
